United States Patent Application Publication US 2025/0092160 A1 - sequence listing, part 2

SEQ ID NO: 2647 - protein, 268 aa, synthetic construct
  REGION 1..268: note = LILRA5 (A6NI73) SP+PP+ECD
MAPWSHPSAQLQPVGGDAVSPALMVLLCLGLSLGPRTHVQAGNLSKATLWAEPGSVISRGNSVTIRCQGTLEAQEYRLVKEGSPEPWDTQNPLEPKNKARFSIPSMTEHHAGRYRCYYYSPAGWSEPSDPLELVVTGFYNKPTLSALPSPVVTSGENVTLQCGSRLRFDRFILTEEGDHKLSWTLDSQLTPSGQFQALFPVGPVTPSHRWMLRCYGSRRHILQVWSEPSDLLEIPVSGAADNLSPSQNKSDSGTASHLQDYAVENLIR

SEQ ID NO: 2648 - protein, 447 aa, synthetic construct
  REGION 1..447: note = LILRA6 (Q6PI73) SP+PP+ECD
MTPALTALLCLGLSLGPRTRVQAGPFPKPTLWAEPGSVISWGSPVTIWCQGSLEAQEYQLDKEGSPEPLDRNNPLEPKNKARFSIPSMTQHHAGRYRCHYYSSAGWSEPSDPLELVMTGFYNKPTLSALPSPVVASGGNMTLRCGSQKGYHHFVLMKEGEHQLPRTLDSQQLHSGGFQALFPVGPVTPSHRWRFTCYYYYTNTPRVWSHPSDPLEILPSGVSRKPSLLTLQGPVLAPGQSLTLQCGSDVGYDRFVLYKEGERDFLQRPGQQPQAGLSQANFTLGPVSPSHGGQYRCYGAHNLSSEWSAPSDPLNILMAGQIYDTVSLSAQPGPTVASGENVTLLCQSRGYFDTFLLTKEGAAHPPLRLRSMYGAHKYQAEFPMSPVTSAHAGTYRCYGSYSSNPHLLSFPSEPLELMVSGHSGGSSLPPTGPPSTPASHAKDYTVEN

SEQ ID NO: 2649 - protein, 461 aa, synthetic construct
  REGION 1..461: note = LILRB1 (Q8NHL6) SP+PP+ECD
MTPILTVLICLGLSLGPRTHVQAGHLPKPTLWAEPGSVITQGSPVTLRCQGGQETQEYRLYREKKTALWITRIPQELVKKGQFPIPSITWEHAGRYRCYYGSDTAGRSESSDPLELVVTGAYIKPTLSAQPSPVVNSGGNVILQCDSQVAFDGFSLCKEGEDEHPQCLNSQPHARGSSRAIFSVGPVSPSRRWWYRCYAYDSNSPYEWSLPSDLLELLVLGVSKKPSLSVQPGPIVAPEETLTLQCGSDAGYNRFVLYKDGERDFLQLAGAQPQAGLSQANFTLGPVSRSYGGQYRCYGAHNLSSEWSAPSDPLDILIAGQFYDRVSLSVQPGPTVASGENVTLLCQSQGWMQTFLLTKEGAADDPWRLRSTYQSQKYQAEFPMGPVTSAHAGTYRCYGSQSSKPYLLTHPSDPLELVVSGPSGGPSSPTTGPTSTSGPEDQPLTPTGSDPQSGLGRHLGV

SEQ ID NO: 2650 - protein, 461 aa, synthetic construct
  REGION 1..461: note = LILRB2 (Q8N423) SP+PP+ECD
MTPIVTVLICLGLSLGPRTHVQTGTIPKPTLWAEPDSVITQGSPVTLSCQGSLEAQEYRLYREKKSASWITRIRPELVKNGQFHIPSITWEHTGRYGCQYYSRARWSELSDPLVLVMTGAYPKPTLSAQPSPVVTSGGRVTLQCESQVAFGGFILCKEGEEEHPQCLNSQPHARGSSRAIFSVGPVSPNRRWSHRCYGYDLNSPYVWSSPSDLLELLVPGVSKKPSLSVQPGPVVAPGESLTLQCVSDVGYDRFVLYKEGERDLRQLPGRQPQAGLSQANFTLGPVSRSYGGQYRCYGAHNLSSECSAPSDPLDILITGQIRGTPFISVQPGPTVASGENVTLLCQSWRQFHTFLLTKAGAADAPLRLRSIHEYPKYQAEFPMSPVTSAHAGTYRCYGSLNSDPYLLSHPSEPLELVVSGPSMGSSPPPTGPISTPAGPEDQPLTPTGSDPQSGLGRHLGV

SEQ ID NO: 2651 - protein, 443 aa, synthetic construct
  REGION 1..443: note = LILRB3 (O75022) SP+PP+ECD
MTPALTALLCLGLSLGPRTRVQAGPFPKPTLWAEPGSVISWGSPVTIWCQGSQEAQEYRLHKEGSPEPLDRNNPLEPKNKARFSIPSMTEHHAGRYRCHYYSSAGWSEPSDPLEMVMTGAYSKPTLSALPSPVVASGGNMTLRCGSQKGYHHFVLMKEGEHQLPRTLDSQQLHSRGFQALFPVGPVTPSHRWRFTCYYYYTNTPWVWSHPSDPLEILPSGVSRKPSLLTLQGPVLAPGQSLTLQCGSDVGYNRFVLYKEGERDFLQRPGQQPQAGLSQANFTLGPVSPSNGGQYRCYGAHNLSSEWSAPSDPLNILMAGQIYDTVSLSAQPGPTVASGENVTLLCQSWWQFDTFLLTKEGAAHPPLRLRSMYGAHKYQAEFPMSPVTSAHAGTYRCYGSYSSNPHLLSHPSEPLELVVSGHSGGSSLPPTGPPSTPGLGRYLE

SEQ ID NO: 2652 - protein, 458 aa, synthetic construct
  REGION 1..458: note = LILRB5 (O75023) SP+PP+ECD
MTLTLSVLICLGLSVGPRTCVQAGTLPKPTLWAEPASVIARGKPVTLWCQGPLETEEYRLDKEGLPWARKRQNPLEPGAKAKFHIPSTVYDSAGRYRCYYETPAGWSEPSDPLELVATGFYAEPTLLALPSPVVASGGNVTLQCDTLDGLLTFVLVEEEQKLPRTLYSQKLPKGPSQALFPVGPVTPSCRWRFRCYYYYRKNPQVWSNPSDLLEILVPGVSRKPSLLIPQGSVVARGGSLTLQCRSDVGYDIFVLYKEGEHDLVQGSGQQPQAGLSQANFTLGPVSRSHGGQYRCYGAHNLSPRWSAPSDPLDILIAGLIPDIPALSVQPGPKVASGENVTLLCQSWHQIDTFFLTKEGAAHPPLCLKSKYQSYRHQAEFSMSPVTSAQGGTYRCYSAIRSYPYLLSSPSYPQELVVSGPSGDPSLSPTGSTPTPGPEDQPLTPTGLDPQSGLGRHLG

SEQ ID NO: 2653 - protein, 561 aa, synthetic construct
  REGION 1..561: note = LINGO1 (Q96FE5) SP+PP+ECD
MQVSKRMLAGGVRSMPSPLLACWQPILLLVLGSVLSGSATGCPPRCECSAQDRAVLCHRKRFVAVPEGIPTETRLLDLGKNRIKTLNQDEFASFPHLEELELNENIVSAVEPGAFNNLFNLRTLGLRSNRLKLIPLGVFTGLSNLTKLDISENKIVILLDYMFQDLYNLKSLEVGDNDLVYISHRAFSGLNSLEQLTLEKCNLTSIPTEALSHLHGLIVLRLRHLNINAIRDYSFKRLYRLKVLEISHWPYLDTMTPNCLYGLNLTSLSITHCNLTAVPYLAVRHLVYLRFLNLSYNPISTIEGSMLHELLRLQEIQLVGGQLAVVEPYAFRGLNYLRVLNVSGNQLTTLEESVFHSVGNLETLILDSNPLACDCRLLWVFRRRWRLNFNRQQPTCATPEFVQGKEFKDFPDVLLPNYFTCRRARIRDRKAQQVFVDEGHTVQFVCRADGDPPPAILWLSPRKHLVSAKSNGRLTVFPDGTLEVRYAQVQDNGTYLCIAANAGGNDSMPAHLHVRSYSPDWPHQPNKTFAFISNQPGEGEANSTRATVPFPFDIKTLIIAT

SEQ ID NO: 2654 - protein, 545 aa, synthetic construct
  REGION 1..545: note = LINGO2 (Q7L985) SP+PP+ECD
MLHTAISCWQPFLGLAVVLIFMGSTIGCPARCECSAQNKSVSCHRRRLIAIPEGIPIETKILDLSKNRLKSVNPEEFISYPLLEEIDLSDNIIANVEPGAFNNLFNLRSLRLKGNRLKLVPLGVFTGLSNLTKLDISENKIVILLDYMFQDLHNLKSLEVGDNDLVYISHRAFSGLLSLEQLTLEKCNLTAVPTEALSHLRSLISLHLKHLNINNMPVYAFKRLFHLKHLEIDYWPLLDMMPANSLYGLNLTSLSVTNTNLSTVPFLAFKHLVYLTHLNLSYNPISTIEAGMFSDLIRLQELHIVGAQLRTIEPHSFQGLRFLRVLNVSQNLLETLEENVFSSPRALEVLSINNNPLACDCRLLWILQRQPTLQFGGQQPMCAGPDTIRERSFKDFHSTALSFYFTCKKPKIREKKLQHLLVDEGQTVQLECSADGDPQPVISWVTPRRRFITTKSNGRATVLGDGTLEIRFAQDQDSGMYVCIASNAAGNDTFTASLTVKGFASDRFLYANRTPMYMTDSNDTISNGTNANTFSLDLKTILVST

SEQ ID NO: 2655 - protein, 531 aa, synthetic construct
  REGION 1..531: note = LINGO3 (P0C6S8) SP+PP+ECD
MTCWLCVLSLPLLLLPAAPPPAGGCPARCECTVQTRAVACTRRRLTAVPDGIPAETRLLELSRNRIRCLNPGDLAALPALEELDLSENAIAHVEPGAFANLPRLRVLRLRGNQLKLIPPGVFTRLDNLTLLDLSENKLVILLDYTFQDLHSLRRLEVGDNDLVFVSRRAFAGLLALEELTLERCNLTALSGESLGHLRSLGALRLRHLAIASLEDQNFRRLPGLLHLEIDNWPLLEEVAAGSLRGLNLTSLSVTHTNITAVPAAALRHQAHLTCLNLSHNPISTVPRGSFRDLVRLRELHLAGALLAVVEPQAFLGLRQIRLLNLSNNLLSTLEESTFHSVNTLETLRVDGNPLACDCRLLWIVQRRKTLNFDGRLPACATPAEVRGDALRNLPDSVLFEYFVCRKPKIRERRLQRVTATAGEDVRFLCRAEGEPAPTVAWVTPQHRPVTATSAGRARVLPGGTLEIQDARPQDSGTYTCVASNAGGNDTYFATLTVRPEPAANRTPGEAHNETLAALRAPLDLTTILVST

SEQ ID NO: 2656 - protein, 533 aa, synthetic construct
  REGION 1..533: note = LINGO4 (Q6UY18) SP+PP+ECD
MDAATAPKQAWPPWPPLLFLLLLPGGSGGSCPAVCDCTSQPQAVLCGHRQLEAVPGGLPLDTELLDLSGNRLWGLQQGMLSRLSLLQELDLSYNQLSTLEPGAFHGLQSLLTLRLQGNRLRIMGPGVFSGLSALTLLDLRLNQIVLFLDGAFGELGSLQKLEVGDNHLVFVAPGAFAGLAKLSTLTLERCNLSTVPGLALARLPALVALRLRELDIGRLPAGALRGLGQLKELEIHLWPSLEALDPGSLVGLNLSSLAITRCNLSSVPFQALYHLSFLRVLDLSQNPISAIPARRLSPLVRLQELRLSGACLTSIAAHAFHGLTAFHLLDVADNALQTLEETAFPSPDKLVTLRLSGNPLTCDCRLLWLLRLRRHLDFGMSPPACAGPHHVQGKSLKEFSDILPPGHFTCKPALIRKSGPRWVIAEEGGHAVFSCSGDGDPAPTVSWMRPHGAWLGRAGRVRVLEDGTLEIRSVQLRDRGAYVCVVSNVAGNDSLRTWLEVIQVEPPNGTLSDPNITVPGIPGPFFLDSRGVA

SEQ ID NO: 2657 - protein, 322 aa, synthetic construct
  REGION 1..322: note = LMAN2 (Q12907) SP+PP+ECD
MAAEGWIWRWGWGRRCLGRPGLLGPGPGPTTPLFLLLLLGSVTADITDGNSEHLKREHSLIKPYQGVGSSSMPLWDFQGSTMLTSQYVRLTPDERSKEGSIWNHQPCFLKDWEMHVHFKVHGTGKKNLHGDGIALWYTRDRLVPGPVFGSKDNFHGLAIFLDTYPNDETTERVFPYISVMVNNGSLSYDHSKDGRWTELAGCTADFRNRDHDTFLAVRYSRGRLTVMTDLEDKNEWKNCIDITGVRLPTGYYFGASAGTGDLSDNHDIISMKLFQLMVEHTPDEESIDWTKIEPSVNFLKSPKDNVDDPTGNFRSGPLTGWR

SEQ ID NO: 2658 - protein, 313 aa, synthetic construct
  REGION 1..313: note = LMAN2L (Q9H0V9) SP+PP+ECD
MAATLGPLGSWQQWRRCLSARDGSRMLLLLLLLGSGQGPQQVGAGQTFEYLKREHSLSKPYQGVGTGSSSLWNLMGNAMVMTQYIRLTPDMQSKQGALWNRVPCFLRDWELQVHFKIHGQGKKNLHGDGLAIWYTKDRMQPGPVFGNMDKFVGLGVFVDTYPNEEKQQERVFPYISAMVNNGSLSYDHERDGRPTELGGCTAIVRNLHYDTFLVIRYVKRHLTIMMDIDGKHEWRDCIEVPGVRLPRGYYFGTSSITGDLSDNHDVISLKLFELTVERTPEEEKLHRDVFLPSVDNMKLPEMTAPLPPLSGLA

SEQ ID NO: 2659 - protein, 536 aa, synthetic construct
  REGION 1..536: note = LRFN1 (Q9P244) SP+PP+ECD
MAPGPFSSALLSPPPAALPFLLLLWAGASRGQPCPGRCICQNVAPTLTMLCAKTGLLFVPPAIDRRVVELRLTDNFIAAVRRRDFANMTSLVHLTLSRNTIGQVAAGAFADLRALRALHLDSNRLAEVRGDQLRGLGNLRHLILGNNQIRRVESAAFDAFLSTVEDLDLSYNNLEALPWEAVGQMVNLNTLTLDHNLIDHIAEGTFVQLHKLVRLDMTSNRLHKLPPDGLFLRSQGTGPKPPTPLTVSFGGNPLHCNCELLWLRRLTREDDLETCATPEHLTDRYFWSIPEEEFLCEPPLITRQAGGRALVVEGQAVSLRCRAVGDPEPVVHWVAPDGRLLGNSSRTRVRGDGTLDVTITTLRDSGTFTCIASNAAGEATAPVEVCVVPLPLMAPPPAAPPPLTEPGSSDIATPGRPGANDSAAERRLVAAELTSNSVLIRWPAQRPVPGIRMYQVQYNSSVDDSLVYRMIPSTSQTFLVNDLAAGRAYDLCVLAVYDDGATALPATRVVGCVQFTTAGDPAPCRPLRAHFLGGTM

SEQ ID NO: 2660 - protein, 534 aa, synthetic construct
  REGION 1..534: note = LRFN2 (Q9ULH4) SP+PP+ECD
METLLGGLLAFGMAFAVVDACPKYCVCQNLSESLGTLCPSKGLLFVPPDIDRRTVELRLGGNFIIHISRQDFANMTGLVDLTLSRNTISHIQPFSFLDLESLRSLHLDSNRLPSLGEDTLRGLVNLQHLIVNNNQLGGIADEAFEDFLLTLEDLDLSYNNLHGLPWDSVRRMVNLHQLSLDHNLLDHIAEGTFADLQKLARLDLTSNRLQKLPPDPIFARSQASALTATPFAPPLSFSFGGNPLHCNCELLWLRRLERDDDLETCGSPGGLKGRYFWHVREEEFVCEPPLITQHTHKLLVLEGQAATLKCKAIGDPSPLIHWVAPDDRLVGNSSRTAVYDNGTLDIFITTSQDSGAFTCIAANAAGEATAMVEVSIVQLPHLSNSTSRTAPPKSRLSDITGSSKTSRGGGGSGGGEPPKSPPERAVLVSEVTTTSALVKWSVSKSAPRVKMYQLQYNCSDDEVLIYRMIPASNKAFVVNNLVSGTGYDLCVLAMWDDTATTLTATNIVGCAQFFTKADYPQCQSMHSQILGGTM

SEQ ID NO: 2661 - protein, 539 aa, synthetic construct
  REGION 1..539: note = LRFN3 (Q9BTN0) SP+PP+ECD
MAILPLLLCLLPLAPASSPPQSATPSPCPRRCRCQTQSLPLSVLCPGAGLLFVPPSLDRRAAELRLADNFIASVRRRDLANMTGLLHLSLSRNTIRHVAAGAFADLRALRALHLDGNRLTSLGEGQLRGLVNLRHLILSNNQLAALAAGALDDCAETLEDLDLSYNNLEQLPWEALGRLGNVNTLGLDHNLLASVPAGAFSRLHKLARLDMTSNRLTTIPPDPLFSRLPLLARPRGSPASALVLAFGGNPLHCNCELVWLRRLAREDDLEACASPPALGGRYFWAVGEEEFVCEPPVVTHRSPPLAVPAGRPAALRCRAVGDPEPRVRWVSPQGRLLGNSSRARAFPNGTLELLVTEPGDGGIFTCIAANAAGEATAAVELTVGPPPPPQLANSTSCDPPRDGDPDALTPPSAASASAKVADTGPPTDRGVQVTEHGATAALVQWPDQRPIPGIRMYQIQYNSSADDILVYRMIPAESRSFLLTDLASGRTYDLCVLAVYEDSATGLTATRPVGCARFSTEPALRPCGAPHAPFLGGTM

SEQ ID NO: 2662 - protein, 518 aa, synthetic construct
  REGION 1..518: note = LRFN4 (Q6PJG9) SP+PP+ECD
MAPPLLLLLLASGAAACPLPCVCQNLSESLSTLCAHRGLLFVPPNVDRRTVELRLADNFIQALGPPDFRNMTGLVDLTLSRNAITRIGARAFGDLESLRSLHLDGNRLVELGTGSLRGPVNLQHLILSGNQLGRIAPGAFDDFLESLEDLDLSYNNLRQVPWAGIGAMPALHTLNLDHNLIDALPPGAFAQLGQLSRLDLTSNRLATLAPDPLFSRGRDAEASPAPLVLSFSGNPLHCNCELLWLRRLARPDDLETCASPPGLAGRYFWAVPEGEFSCEPPLIARHTQRLWVLEGQRATLRCRALGDPAPTMHWVGPDDRLVGNSSRARAFPNGTLEIGVTGAGDAGGYTCIATNPAGEATARVELRVLALPHGGNSSAEGGRPGPSDIAASARTAAEGEGTLESEPAVQVTEVTATSGLVSWGPGRPADPVWMFQIQYNSSEDETLIYRIVPASSHHFLLKHLVPGADYDLCLLALSPAAGPSDLTATRLLGCAHFSTLPASPLCHALQAHVLGGTL

SEQ ID NO: 2663 - protein, 529 aa, synthetic construct
  REGION 1..529: note = LRFN5 (Q96NI6) SP+PP+ECD
MEKILFYLFLIGIAVKAQICPKRCVCQILSPNLATLCAKKGLLFVPPNIDRRTVELRLADNFVTNIKRKDFANMTSLVDLTLSRNTISFITPHAFADLRNLRALHLNSNRLTKITNDMFSGLSNLHHLILNNNQLTLISSTAFDDVFALEELDLSYNNLETIPWDAVEKMVSLHTLSLDHNMIDNIPKGTFSHLHKMTRLDVTSNKLQKLPPDPLFQRAQVLATSGIISPSTFALSFGGNPLHCNCELLWLRRLSREDDLETCASPPLLTGRYFWSIPEEEFLCEPPLITRHTHEMRVLEGQRATLRCKARGDPEPAIHWISPEGKLISNATRSLVYDNGTLDILITTVKDTGAFTCIASNPAGEATQIVDLHIIKLPHLLNSTNHIHEPDPGSSDISTSTKSGSNTSSSNGDTKLSQDKIVVAEATSSTALLKFNFQRNIPGIRMFQIQYNGTYDDTLVYRMIPPTSKTFLVNNLAAGTMYDLCVLAIYDDGITSLTATRVVGCIQFTTEQDYVRCHFMQSQFLGGTM

SEQ ID NO: 2664 - protein, 794 aa, synthetic construct
  REGION 1..794: note = LRIG1 (Q96JA1) SP+PP+ECD
MARPVRGGLGAPRRSPCLLLLWLLLLRLEPVTAAAGPRAPCAAACTCAGDSLDCGGRGLAALPGDLPSWTRSLNLSYNKLSEIDPAGFEDLPNLQEVYLNNNELTAVPSLGAASSHVVSLFLQHNKIRSVEGSQLKAYLSLEVLDLSLNNITEVRNTCFPHGPPIKELNLAGNRIGTLELGAFDGLSRSLLTLRLSKNRITQLPVRAFKLPRLTQLDLNRNRIRLIEGLTFQGLNSLEVLKLQRNNISKLTDGAFWGLSKMHVLHLEYNSLVEVNSGSLYGLTALHQLHLSNNSIARIHRKGWSFCQKLHELVLSFNNLTRLDEESLAELSSLSVLRLSHNSISHIAEGAFKGLRSLRVLDLDHNEISGTIEDTSGAFSGLDSLSKLTLFGNKIKSVAKRAFSGLEGLEHLNLGGNAIRSVQFDAFVKMKNLKELHISSDSFLCDCQLKWLPPWLIGRMLQAFVTATCAHPESLKGQSIFSVPPESFVCDDFLKPQIITQPETTMAMVGKDIRFTCSAASSSSSPMTFAWKKDNEVLTNADMENFVHVHAQDGEVMEYTTILHLRQVTFGHEGRYQCVITNHFGSTYSHKARLTVNVLPSFTKTPHDITIRTTTMARLECAATGHPNPQIAWQKDGGTDFPAARERRMHVMPDDDVFFITDVKIDDAGVYSCTAQNSAGSISANATLTVLETPSLVVPLEDRVVSVGETVALQCKATGNPPPRITWFKGDRPLSLTERHHLTPDNQLLVVQNVVAEDAGRYTCEMSNTLGTERAHSQLSVLPAAGCRKDGTTVG

SEQ ID NO: 2665 - protein, 807 aa, synthetic construct
  REGION 1..807: note = LRIG2 (O94898) SP+PP+ECD
MAPAPLGVPEEQLLGCRSRVLSRLLFIAQTALLLLPAAGAGLCPAPCSCRIPLLDCSRRKLPAPSWRALSGLLPPDTAILDFSHNRLSNWNISLESQTLQEVKMNYNELTEIPYFGEPTSNITLLSLVHNIIPEINAQALQFYPALESLDLSSNIISEIKTSSFPRMQLKYLNLSNNRITTLEAGCFDNLSSSLLVVKLNRNRMSMIPPKIFKLPHLQFLELKRNRIKIVEGLTFQGLDSLRSLKMQRNGISKLKDGAFFGLNNMEELELEHNNLTRVNKGWLYGLRMLQQLYVSQNAIERISPDAWEFCQRLSELDLSYNQLTRLDESAFVGLSLLERLNLGDNRVTHIADGVFRFLSNLQTLDLRNNEISWAIEDASEAFAGLTSLTKLILQGNQIKSITKKAFIGLESLEHLDLNNNAIMSIQENAFSQTHLKELILNTSSLLCDCHLKWLLQWLVDNNFQHSVNVSCAHPEWLAGQSILNVDLKDFVCDDFLKPQIRTHPETIIALRGMNVTLTCTAVSSSDSPMSTVWRKDSEILYDVDTENFVRYWQQAGEALEYTSILHLFNVNFTDEGKYQCIVTNHFGSNYSQKAKLTVNEMPSFLKTPMDLTIRTGAMARLECAAEGHPAPQISWQKDGGTDFPAARERRMHVMPEDDVFFIANVKIEDMGIYSCMAQNTAGGLSANASLTVLETPSFIRPLEDKTVTRGETAVLQCIAGGSPAPRLNWTKDDGPLLVTERHFFAAANQLLIIVDAGLEDAGKYTCIMSNTLGTERGHIYLNVISSPNCDSSQSSIGHEDDGWTTVG

SEQ ID NO: 2666 - protein, 809 aa, synthetic construct
  REGION 1..809: note = LRIG3 (Q6UXM1) SP+PP+ECD
MSAPSLRARAAGLGLLLCAVLGRAGRSDSGGRGELGQPSGVAAERPCPTTCRCLGDLLDCSRKRLARLPEPLPSWVARLDLSHNRLSFIKASSMSHLQSLREVKLNNNELETIPNLGPVSANITLLSLAGNRIVEILPEHLKEFQSLETLDLSSNNISELQTAFPALQLKYLYLNSNRVTSMEPGYFDNLANTLLVLKLNRNRISAIPPKMFKLPQLQHLELNRNKIKNVDGLTFQGLGALKSLKMQRNGVTKLMDGAFWGLSNMEILQLDHNNLTEITKGWLYGLLMLQELHLSQNAINRISPDAWEFCQKLSELDLTFNHLSRLDDSSFLGLSLLNTLHIGNNRVSYIADCAFRGLSSLKTLDLKNNEISWTIEDMNGAFSGLDKLRRLILQGNRIRSITKKAFTGLDALEHLDLSDNAIMSLQGNAFSQMKKLQQLHLNTSSLLCDCQLKWLPQWVAENNFQSFVNASCAHPQLLKGRSIFAVSPDGFVCDDFPKPQITVQPETQSAIKGSNLSFICSAASSSDSPMTFAWKKDNELLHDAEMENYAHLRAQGGEVMEYTTILRLREVEFASEGKYQCVISNHFGSSYSVKAKLTVNMLPSFTKTPMDLTIRAGAMARLECAAVGHPAPQIAWQKDGGTDFPAARERRMHVMPEDDVFFIVDVKIEDIGVYSCTAQNSAGSISANATLTVLETPSFLRPLLDRTVTKGETAVLQCIAGGSPPPKLNWTKDDSPLVVTERHFFAAGNQLLIIVDSDVSDAGKYTCEMSNTLGTERGNVRLSVIPTPTCDSPQMTAPSLDDDGWATVG

SEQ ID NO: 2667 - protein, 526 aa, synthetic construct
  REGION 1..526: note = LRIT1 (Q9P2V4) SP+PP+ECD
MRVALGMLWLLALAWPPQARGFCPSQCSCSLHIMGDGSKARTVVCNDPDMTLPPASIPPDTSRLRLERTAIRRVPGEAFRPLGRLEQLWLPYNALSELNALMLRGLRRLRELRLPGNRLAAFPWAALRDAPKLRLLDLQANRLSAVPAEAARFLENLTFLDLSSNQLMRLPQELIVSWAHLETGIFPPGHHPRRVLGLQDNPWACDCRLYDLVHLLDGWAPNLAFIETELRCASPRSLAGVAFSQLELRKCQGPELHPGVASIRSLLGGTALLRCGATGVPGPEMSWRRANGRPLNGTVHQEVSSDGTSWTLLGLPAVSHLDSGDYICQAKNFLGASETVISLIVTEPPTSTEHSGSPGALWARTGGGGEAAAYNNKLVARHVPQIPKPAVLATGPSVPSTKEELTLEHFQMDALGELSDGRAGPSEARMVRSVKVVGDTYHSVSLVWKAPQAKNTTAFSVLYAVFGQHSMRRVIVQPGKTRVTITGLLPKTKYVACVCVQGLVPRKEQCVIFSTNEVVDAENTQQ

SEQ ID NO: 2668 - protein, 465 aa, synthetic construct
  REGION 1..465: note = LRIT2 (A6NDA9) SP+PP+ECD
MASVFHYFLLVLVFLDTHAAQPFCLPGCTCSEESFGRTLQCTSVSLGKIPGNLSEEFKQVRIENSPLFEMPQGSFINMSTLEYLWLNFNNISVIHLGALEHLPELRELRLEGNKLCSVPWTAFRATPLLRVLDLKRNKIDALPELALQFLVSLTYLDLSSNRLTVVSKSVFLNWPAYQKCRQPDCGAEILSSLVVALHDNPWVCDCRLRGLVQFVKSITLPVILVNSYLICQGPLSKAGQLFHETELSACMKPQISTPSANITIRAGQNVTLRCLAQASPSPSIAWTYPLSMWREFDVLTSSTGEDTALSELAIPAAHLVDSGNYTCMASNSIGKSNLVISLHVQPAQALHAPDSLSIPSEGNAYIDLRVVKQTVHGILLEWLAVADTSKEEWFTLYIASDEAFRKEVVHIGPGINTYAVDDLLPGTKYEACLSLEGQPPHQGQCVAFVTGRDAGGLEAREHLLH

SEQ ID NO: 2669 - protein, 582 aa, synthetic construct
  REGION 1..582: note = LRIT3 (Q3SXY7) SP+PP+ECD
MHLFACLCIVLSFLEGVGCLCPSQCTCDYHGRNDGSGSRLVLCNDMDMNELPTNLPVDTVKLRIEKTVIRRISAEAFYYLVELQYLWVTYNSVASIDPSSFYNLKQLHELRLDGNSLAAFPWASLLDMPLLRTLDLHNNKITSVPNEALRYLKNLAYLDLSSNRLTTLPPDFLESWTHLVSTPSGVLDLSPSRIILGLQDNPWFCDCHISKMIELSKVVDPAIVLLDPLMTCSEPERLTGILFQRAELEHCLKPSVMTSATKIMSALGSNVLLRCDATGFPTPQITWTRSDSSPVNYTVIQESPEEGVRWSIMSLTGISSKDAGDYKCKAKNLAGMSEAVVTVTVLGITTTPIPPDTSERTGDHPEWDVQPGSGRSTSVSSASSYLWSSSFSPTSSFSASTLSPPSTASFSLSPFSSSTVSSTTTLSTSISASTTMANKRSFQLHQGGKRNLKVAKNGSKLPPASTSKKEELALLDQTMLTETNAAIENLRVVSETKESVTLTWNMINTTHNSAVTVLYSKYGGKDLLLLNADSSKNQVTIDGLEPGGQYMACVCPKGVPPQKDQCITFSTERVEGDDSQWS

SEQ ID NO: 2670 - protein, 4419 aa, synthetic construct
  REGION 1..4419: note = LRP1 (Q07954) SP+PP+ECD
MLTPPLLLLLPLLSALVAAAIDAPKTCSPKQFACRDQITCISKGWRCDGERDCPDGSDEAPEICPQSKAQRCQPNEHNCLGTELCVPMSRLCNGVQDCMDGSDEGPHCRELQGNCSRLGCQHHCVPTLDGPTCYCNSSFQLQADGKTCKDFDECSVYGTCSQLCTNTDGSFICGCVEGYLLQPDNRSCKAKNEPVDRPPVLLIANSQNILATYLSGAQVSTITPTSTRQTTAMDFSYANETVCWVHVGDSAAQTQLKCARMPGLKGFVDEHTINISLSLHHVEQMAIDWLTGNFYFVDDIDDRIFVCNRNGDTCVTLLDLELYNPKGIALDPAMGKVFFTDYGQIPKVERCDMDGQNRTKLVDSKIVFPHGITLDLVSRLVYWADAYLDYIEVVDYEGKGRQTIIQGILIEHLYGLTVFENYLYATNSDNANAQQKTSVIRVNRFNSTEYQVVTRVDKGGALHIYHQRRQPRVRSHACENDQYGKPGGCSDICLLANSHKARTCRCRSGFSLGSDGKSCKKPEHELFLVYGKGRPGIIRGMDMGAKVPDEHMIPIENLMNPRALDFHAETGFIYFADTTSYLIGRQKIDGTERETILKDGIHNVEGVAVDWMGDNLYWTDDGPKKTISVARLEKAAQTRKTLIEGKMTHPRAIVVDPLNGWMYWTDWEEDPKDSRRGRLERAWMDGSHRDIFVTSKTVLWPNGLSLDIPAGRLYWVDAFYDRIETILLNGTDRKIVYEGPELNHAFGLCHHGNYLFWTEYRSGSVYRLERGVGGAPPTVTLLRSERPPIFEIRMYDAQQQQVGTNKCRVNNGGCSSLCLATPGSRQCACAEDQVLDADGVTCLANPSYVPPPQCQPGEFACANSRCIQERWKCDGDNDCLDNSDEAPALCHQHTCPSDRFKCENNRCIPNRWLCDGDNDCGNSEDESNATCSARTCPPNQFSCASGRCIPISWTCDLDDDCGDRSDESASCAYPTCFPLTQFTCNNGRCININWRCDNDNDCGDNSDEAGCSHSCSSTQFKCNSGRCIPEHWTCDGDNDCGDYSDETHANCTNQATRPPGGCHTDEFQCRLDGLCIPLRWRCDGDTDCMDSSDEKSCEGVTHVCDPSVKFGCKDSARCISKAWVCDGDNDCEDNSDEENCESLACRPPSHPCANNTSVCLPPDKLCDGNDDCGDGSDEGELCDQCSLNNGGCSHNCSVAPGEGIVCSCPLGMELGPDNHTCQIQSYCAKHLKCSQKCDQNKFSVKCSCYEGWVLEPDGESCRSLDPFKPFIIFSNRHEIRRIDLHKGDYSVLVPGLRNTIALDFHLSQSALYWTDVVEDKIYRGKLLDNGALTSFEVVIQYGLATPEGLAVDWIAGNIYWVESNLDQIEVAKLDGTLRTTLLAGDIEHPRAIALDPRDGILFWTDWDASLPRIEAASMSGAGRRTVHRETGSGGWPNGLTVDYLEKRILWIDARSDAIYSARYDGSGHMEVLRGHEFLSHPFAVTLYGGEVYWTDWRTNTLAKANKWTGHNVTVVQRTNTQPFDLQVYHPSRQPMAPNPCEANGGQGPCSHLCLINYNRTVSCACPHLMKLHKDNTTCYEFKKFLLYARQMEIRGVDLDAPYYNYIISFTVPDIDNVTVLDYDAREQRVYWSDVRTQAIKRAFINGTGVETVVSADLPNAHGLAVDWVSRNLFWTSYDTNKKQINVARLDGSFKNAVVQGLEQPHGLVVHPLRGKLYWTDGDNISMANMDGSNRTLLFSGQKGPVGLAIDFPESKLYWISSGNHTINRCNLDGSGLEVIDAMRSQLGKATALAIMGDKLWWADQVSEKMGTCSKADGSGSVVLRNSTTLVMHMKVYDESIQLDHKGTNPCSVNNGDCSQLCLPTSETTRSCMCTAGYSLRSGQQACEGVGSFLLYSVHEGIRGIPLDPNDKSDALVPVSGTSLAVGIDFHAENDTIYWVDMGLSTISRAKRDQTWREDVVTNGIGRVEGIAVDWIAGNIYWTDQGFDVIEVARLNGSFRYVVISQGLDKPRAITVHPEKGYLFWTEWGQYPRIERSRLDGTERVVLVNVSISWPNGISVDYQDGKLYWCDARTDKIERIDLETGENREVVLSSNNMDMFSVSVFEDFIYWSDRTHANGSIKRGSKDNATDSVPLRTGIGVQLKDIKVFNRDRQKGTNVCAVANGGCQQLCLYRGRGQRACACAHGMLAEDGASCREYAGYLLYSERTILKSIHLSDERNLNAPVQPFEDPEHMKNVIALAFDYRAGTSPGTPNRIFFSDIHFGNIQQINDDGSRRITIVENVGSVEGLAYHRGWDTLYWTSYTTSTITRHTVDQTRPGAFERETVITMSGDDHPRAFVLDECQNLMFWTNWNEQHPSIMRAALSGANVLTLIEKDIRTPNGLAIDHRAEKLYFSDATLDKIERCEYDGSHRYVILKSEPVHPFGLAVYGEHIFWTDWVRRAVQRANKHVGSNMKLLRVDIPQQPMGIIAVANDTNSCELSPCRINNGGCQDLCLLTHQGHVNCSCRGGRILQDDLTCRAVNSSCRAQDEFECANGECINFSLTCDGVPHCKDKSDEKPSYCNSRRCKKTFRQCSNGRCVSNMLWCNGADDCGDGSDEIPCNKTACGVGEFRCRDGTCIGNSSRCNQFVDCEDASDEMNCSATDCSSYFRLGVKGVLFQPCERTSLCYAPSWVCDGANDCGDYSDERDCPGVKRPRCPLNYFACPSGRCIPMSWTCDKEDDCEHGEDETHCNKFCSEAQFECQNHRCISKQWLCDGSDDCGDGSDEAAHCEGKTCGPSSFSCPGTHVCVPERWLCDGDKDCADGADESIAAGCLYNSTCDDREFMCQNRQCIPKHFVCDHDRDCADGSDESPECEYPTCGPSEFRCANGRCLSSRQWECDGENDCHDQSDEAPKNPHCTSQEHKCNASSQFLCSSGRCVAEALLCNGQDDCGDSSDERGCHINECLSRKLSGCSQDCEDLKIGFKCRCRPGFRLKDDGRTCADVDECSTTFPCSQRCINTHGSYKCLCVEGYAPRGGDPHSCKAVTDEEPFLIFANRYYLRKLNLDGSNYTLLKQGLNNAVALDFDYREQMIYWTDVTTQGSMIRRMHLNGSNVQVLHRTGLSNPDGLAVDWVGGNLYWCDKGRDTIEVSKLNGAYRTVLVSSGLREPRALVVDVQNGYLYWTDWGDHSLIGRIGMDGSSRSVIVDTKITWPNGLTLDYVTERIYWADAREDYIEFASLDGSNRHVVLSQDIPHIFALTLFEDYVYWTDWETKSINRAHKTTGTNKTLLISTLHRPMDLHVFHALRQPDVPNHPCKVNNGGCSNLCLLSPGGGHKCACPTNFYLGSDGRTCVSNCTASQFVCKNDKCIPFWWKCDTEDDCGDHSDEPPDCPEFKCRPGQFQCSTGICTNPAFICDGDNDCQDNSDEANCDIHVCLPSQFKCTNTNRCIPGIFRCNGQDNCGDGEDERDCPEVTCAPNQFQCSITKRCIPRVWVCDRDNDCVDGSDEPANCTQMTCGVDEFRCKDSGRCIPARWKCDGEDDCGDGSDEPKEECDERTCEPYQFRCKNNRCVPGRWQCDYDNDCGDNSDEESCTPRPCSESEFSCANGRCIAGRWKCDGDHDCADGSDEKDCTPRCDMDQFQCKSGHCIPLRWRCDADADCMDGSDEEACGTGVRTCPLDEFQCNNTLCKPLAWKCDGEDDCGDNSDENPEECARFVCPPNRPFRCKNDRVCLWIGRQCDGTDNCGDGTDEEDCEPPTAHTTHCKDKKEFLCRNQRCLSSSLRCNMFDDCGDGSDEEDCSIDPKLTSCATNASICGDEARCVRTEKAAYCACRSGFHTVPGQPGCQDINECLRFGTCSQLCNNTKGGHLCSCARNFMKTHNTCKAEGSEYQVLYIADDNEIRSLFPGHPHSAYEQAFQGDESVRIDAMDVHVKAGRVYWTNWHTGTISYRSLPPAAPPTTSNRHRRQIDRGVTHLNISGLKMPRGIAIDWVAGNVYWTDSGRDVIEVAQMKGENRKTLISGMIDEPHAIVVDPLRGTMYWSDWGNHPKIETAAMDGTLRETLVQDNIQWPTGLAVDYHNERLYWADAKLSVIGSIRLNGTDPIVAADSKRGLSHPFSIDVFEDYIYGVTYINNRVFKIHKFGHSPLVNLTGGLSHASDVVLYHQHKQPEVTNPCDRKKCEWLCLLSPSGPVCTCPNGKRLDNGTCVPVPSPTPPPDAPRPGTCNLQCFNGGSCFLNARRQPKCRCQPRYTGDKCELDQCWEHCRNGGTCAASPSGMPTCRCPTGFTGPKCTQQVCAGYCANNSTCTVNQGNQPQCRCLPGFLGDRCQYRQCSGYCENFGTCQMAADGSRQCRCTAYFEGSRCEVNKCSRCLEGACVVNKQSGDVTCNCTDGRVAPSCLTCVGHCSNGGSCTMNSKMMPECQCPPHMTGPRCEEHVFSQQQPG

SEQ ID NO: 2671 - protein, 440 aa, synthetic construct
  REGION 1..440: note = LRP10 (Q7Z4F1) SP+PP+ECD
MLLATLLLLLLGGALAHPDRIIFPNHACEDPPAVLLEVQGTLQRPLVRDSRTSPANCTWLILGSKEQTVTIRFQKLHLACGSERLTLRSPLQPLISLCEAPPSPLQLPGGNVTITYSYAGARAPMGQGFLLSYSQDWLMCLQEEFQCLNHRCVSAVQRCDGVDACGDGSDEAGCSSDPFPGLTPRPVPSLPCNVTLEDFYGVFSSPGYTHLASVSHPQSCHWLLDPHDGRRLAVRFTALDLGFGDAVHVYDGPGPPESSRLLRSLTHFSNGKAVTVETLSGQAVVSYHTVAWSNGRGFNATYHVRGYCLPWDRPCGLGSGLGAGEGLGERCYSEAQRCDGSWDCADGTDEEDCPGCPPGHFPCGAAGTSGATACYLPADRCNYQTFCADGADERRCRHCQPGNFRCRDEKCVYETWVCDGQPDCADGSDEWDCSYVLPRK

SEQ ID NO: 2672 - protein, 450 aa, synthetic construct
  REGION 1..450: note = LRP11 (Q86VZ4) SP+PP+ECD
MASVAQESAGSQRRLPPRHGALRGLLLLCLWLPSGRAALPPAAPLSELHAQLSGVEQLLEEFRRQLQQERPQEELELELRAGGGPQEDCPGPGSGGYSAMPDAIIRTKDSLAAGASFLRAPAAVRGWRQCVAACCSEPRCSVAVVELPRRPAPPAAVLGCYLFNCTARGRNVCKFALHSGYSSYSLSRAPDGAALATARASPRQEKDAPPLSKAGQDVVLHLPTDGVVLDGRESTDDHAIVQYEWALLQGDPSVDMKVPQSGTLKLSHLQEGTYTFQLTVTDTAGQRSSDNVSVTVLRAAYSTGGCLHTCSRYHFFCDDGCCIDITLACDGVQQCPDGSDEDFCQNLGLDRKMVTHTAASPALPRTTGPSEDAGGDSLVEKSQKATAPNKPPALSNTEKRNHSAFWGPESQIIPVMPDSSSSGKNRKEESYIFESKGDGGGGEHPAPETG

SEQ ID NO: 2673 - protein, 492 aa, synthetic construct
  REGION 1..492: note = LRP12 (Q9Y561) SP+PP+ECD
MACRWSTKESPRWRSALLLLFLAGVYGNGALAEHSENVHISGVSTACGETPEQIRAPSGIITSPGWPSEYPAKINCSWFIRANPGEIITISFQDFDIQGSRRCNLDWLTIETYKNIESYRACGSTIPPPYISSQDHIWIRFHSDDNISRKGFRLAYFSGKSEEPNCACDQFRCGNGKCIPEAWKCNNMDECGDSSDEEICAKEANPPTAAAFQPCAYNQFQCLSRFTKVYTCLPESLKCDGNIDCLDLGDEIDCDVPTCGQWLKYFYGTFNSPNYPDFYPPGSNCTWLIDTGDHRKVILRFTDFKLDGTGYGDYVKIYDGLEENPHKLLRVLTAFDSHAPLTVVSSSGQIRVHFCADKVNAARGFNATYQVDGFCLPWEIPCGGNWGCYTEQQRCDGYWHCPNGRDETNCTMCQKEEFPCSRNGVCYPRSDRCNYQNHCPNGSDEKNCFFCQPGNFHCKNNRCVFESWVCDSQDDCGDGSDEENCPVIVPTR

SEQ ID NO: 2674 - protein, 4440 aa, synthetic construct
  REGION 1..4440: note = LRP1B (Q9NZR2) SP+PP+ECD
MSEFLLALLTLSGLLPIARVADRDQQLCDPGEFLCHDHVTCVSQSWLCDGDPDCPDDSDESLDTCPEEVEIKCPLNHIACLGTNKCVHLSQLCNGVLDCPDGYDEGVHCQELLSNCQQLNCQYKCTMVRNSTRCYCEDGFEITEDGRSCKDQDECAVYGTCSQTCRNTHGSYTCSCVEGYLMQPDNRSCKAKIEPTDRPPILLIANFETIEVFYLNGSKMATLSSVNGNEIHTLDFIYNEDMICWIESRESSNQLKCIQITKAGGLTDEWTINILQSFHNVQQMAIDWLTRNLYFVDHVGDRIFVCNSNGSVCVTLIDLELHNPKAIAVDPIAGKLFFTDYGNVAKVERCDMDGMNRTRIIDSKTEQPAALALDLVNKLVYWVDLYLDYVGVVDYQGKNRHTVIQGRQVRHLYGITVFEDYLYATNSDNYNIVRINRFNGTDIHSLIKIENAWGIRIYQKRTQPTVRSHACEVDPYGMPGGCSHICLLSSSYKTRTCRCRTGFNLGSDGRSCKRPKNELFLFYGKGRPGIVRGMDLNTKIADEYMIPIENLVNPRALDFHAETNYIYFADTTSFLIGRQKIDGTERETILKDDLDNVEGIAVDWIGNNLYWTNDGHRKTINVARLEKASQSRKTLLEGEMSHPRGIVVDPVNGWMYWTDWEEDEIDDSVGRIEKAWMDGFNRQIFVTSKMLWPNGLTLDFHTNTLYWCDAYYDHIEKVFLNGTHRKIVYSGRELNHPFGLSHHGNYVFWTDYMNGSIFQLDLITSEVTLLRHERPPLFGLQIYDPRKQQGDNMCRVNNGGCSTLCLAIPGGRVCACADNQLLDENGTTCTFNPGEALPHICKAGEFRCKNRHCIQARWKCDGDDDCLDGSDEDSVNCFNHSCPDDQFKCQNNRCIPKRWLCDGANDCGSNEDESNQTCTARTCQVDQFSCGNGRCIPRAWLCDREDDCGDQTDEMASCEFPTCEPLTQFVCKSGRCISSKWHCDSDDDCGDGSDEVGCVHSCFDNQFRCSSGRCIPGHWACDGDNDCGDFSDEAQINCTKEEIHSPAGCNGNEFQCHPDGNCVPDLWRCDGEKDCEDGSDEKGCNGTIRLCDHKTKFSCWSTGRCINKAWVCDGDIDCEDQSDEDDCDSFLCGPPKHPCANDTSVCLQPEKLCNGKKDCPDGSDEGYLCDECSLNNGGCSNHCSVVPGRGIVCSCPEGLQLNKDNKTCEIVDYCSNHLKCSQVCEQHKHTVKCSCYEGWKLDVDGESCTSVDPFEAFIIFSIRHEIRRIDLHKRDYSLLVPGLRNTIALDFHFNQSLLYWTDVVEDRIYRGKLSESGGVSAIEVVVEHGLATPEGLTVDWIAGNIYWIDSNLDQIEVAKLDGSLRTTLIAGAMEHPRAIALDPRYGILFWTDWDANFPRIESASMSGAGRKTIYKDMKTGAWPNGLTVDHFEKRIVWTDARSDAIYSALYDGTNMIEIIRGHEYLSHPFAVSLYGSEVYWTDWRTNTLSKANKWTGQNVSVIQKTSAQPFDLQIYHPSRQPQAPNPCAANDGKGPCSHMCLINHNRSAACACPHLMKLSSDKKTCYEMKKFLLYARRSEIRGVDIDNPYFNFITAFTVPDIDDVTVIDFDASEERLYWTDIKTQTIKRAFINGTGLETVISRDIQSIRGLAVDWVSRNLYWISSEFDETQINVARLDGSLKTSIIHGIDKPQCLAAHPVRGKLYWTDGNTINMANMDGSNSKILFQNQKEPVGLSIDYVENKLYWISSGNGTINRCNLDGGNLEVIESMKEELTKATALTIMDKKLWWADQNLAQLGTCSKRDGRNPTILRNKTSGVVHMKVYDKEAQQGSNSCQLNNGGCSQLCLPTSETTRTCMCTVGYYLQKNRMSCQGIESFLMYSVHEGIRGIPLEPSDKMDALMPISGTSFAVGIDFHAENDTIYWTDMGFNKISRAKRDQTWKEDIITNGLGRVEGIAVDWIAGNIYWTDHGFNLIEVARLNGSFRYVIISQGLDQPRSIAVHPEKGLLFWTEWGQMPCIGKARLDGSEKVVLVSMGIAWPNGISIDYEENKLYWCDARTDKIERIDLETGGNREMVLSGSNVDMFSVAVFGAYIYWSDRAHANGSVRRGHKNDATETITMRTGLGVNLKEVKIFNRVREKGTNVCARDNGGCKQLCLYRGNSRRTCACAHGYLAEDGVTCLRHEGYLLYSGRTILKSIHLSDETNLNSPIRPYENPRYFKNVIALAFDYNQRRKGTNRIFYSDAHFGNIQLIKDNWEDRQVIVENVGSVEGLAYHRAWDTLYWTSSTTSSITRHTVDQTRPGAFDREAVITMSEDDHPHVLALDECQNLMFWTNWNEQHPSIMRSTLTGKNAQVVVSTDILTPNGLTIDYRAEKLYFSDGSLGKIERCEYDGSQRHVIVKSGPGTFLSLAVYDNYIFWSDWGRRAILRSNKYTGGDTKILRSDIPHQPMGIIAVANDTNSCELSPCALLNGGCHDLCLLTPNGRVNCSCRGDRILLEDNRCVTKNSSCNAYSEFECGNGECIDYQLTCDGIPHCKDKSDEKLLYCENRSCRRGFKPCYNRRCIPHGKLCDGENDCGDNSDELDCKVSTCATVEFRCADGTCIPRSARCNQNIDCADASDEKNCNNTDCTHFYKLGVKTTGFIRCNSTSLCVLPTWICDGSNDCGDYSDELKCPVQNKHKCEENYFSCPSGRCILNTWICDGQKDCEDGRDEFHCDSSCSWNQFACSAQKCISKHWICDGEDDCGDGLDESDSICGAITCAADMFSCQGSRACVPRHWLCDGERDCPDGSDELSTAGCAPNNTCDENAFMCHNKVCIPKQFVCDHDDDCGDGSDESPQCGYRQCGTEEFSCADGRCLLNTQWQCDGDFDCPDHSDEAPLNPKCKSAEQSCNSSFFMCKNGRCIPSGGLCDNKDDCGDGSDERNCHINECLSKKVSGCSQDCQDLPVSYKCKCWPGFQLKDDGKTCVDIDECSSGFPCSQQCINTYGTYKCLCTDGYEIQPDNPNGCKSLSDEEPFLILADHHEIRKISTDGSNYTLLKQGLNNVIAIDFDYREEFIYWIDSSRPNGSRINRMCLNGSDIKVVHNTAVPNALAVDWIGKNLYWSDTEKRIIEVSKLNGLYPTILVSKRLKFPRDLSLDPQAGYLYWIDCCEYPHIGRVGMDGTNQSVVIETKISRPMALTIDYVNRRLYWADENHIEFSNMDGSHRHKVPNQDIPGVIALTLFEDYIYWTDGKTKSLSRAHKTSGADRLSLIYSWHAITDIQVYHSYRQPDVSKHLCMINNGGCSHLCLLAPGKTHTCACPTNFYLAADNRTCLSNCTASQFRCKTDKCIPFWWKCDTVDDCGDGSDEPDDCPEFRCQPGRFQCGTGLCALPAFICDGENDCGDNSDELNCDTHVCLSGQFKCTKNQKCIPVNLRCNGQDDCGDEEDERDCPENSCSPDYFQCKTTKHCISKLWVCDEDPDCADASDEANCDKKTCGPHEFQCKNNNCIPDHWRCDSQNDCSDNSDEENCKPQTCTLKDFLCANGDCVSSRFWCDGDFDCADGSDERNCETSCSKDQFRCSNGQCIPAKWKCDGHEDCKYGEDEKSCEPASPTCSSREYICASDGCISASLKCNGEYDCADGSDEMDCVTECKEDQFRCKNKAHCIPIRWLCDGIHDCVDGSDEENCERGGNICRADEFLCNNSLCKLHFWVCDGEDDCGDNSDEAPDMCVKFLCPSTRPHRCRNNRICLQSEQMCNGIDECGDNSDEDHCGGKLTYKARPCKKDEFACSNKKCIPMDLQCDRLDDCGDGSDEQGCRIAPTEYTCEDNVNPCGDDAYCNQIKTSVFCRCKPGFQRNMKNRQCEDLNECLVFGTCSHQCINVEGSYKCVCDQNFQERNNTCIAEGSEDQVLYIANDTDILGFIYPFNYSGDHQQISHIEHNSRITGMDVYYQRDMIIWSTQFNPGGIFYKRIHGREKRQANSGLICPEFKRPRDIAVDWVAGNIYWTDHSRMHWFSYYTTHWTSLRYSINVGQLNGPNCTRLLTNMAGEPYAIAVNPKRGMMYWTVVGDHSHIEEAAMDGTLRRILVQKNLQRPTGLAVDYFSERIYWADFELSIIGSVLYDGSNSVVSVSSKQGLLHPHRIDIFEDYIYGAGPKNGVFRVQKFGHGSVEYLALNIDKTKGVLISHRYKQLDLPNPCLDLACEFLCLLNPSGATCVCPEGKYLINGTCNDDSLLDDSCKLTCENGGRCILNEKGDLRCHCWPSYSGERCEVNHCSNYCQNGGTCVPSVLGRPTCSCALGFTGPNCGKTVCEDFCQNGGTCIVTAGNQPYCHCQPEYTGDRCQYYVCHHYCVNSESCTIGDDGSVECVCPTRYEGPKCEVDKCVRCHGGHCIINKDSEDIFCNCTNGKIASSCQLCDGYCYNGGTCQLDPETNVPVCLCSTNWSGTQCERPAPKSSKSDHISTRSI

SEQ ID NO: 2675 - protein, 4423 aa, synthetic construct
  REGION 1..4423: note = LRP2 (P98164) SP+PP+ECD
MDRGPAAVACTLLLALVACLAPASGQECDSAHFRCGSGHCIPADWRCDGTKDCSDDADEIGCAVVTCQQGYFKCQSEGQCIPNSWVCDQDQDCDDGSDERQDCSQSTCSSHQITCSNGQCIPSEYRCDHVRDCPDGADENDCQYPTCEQLTCDNGACYNTSQKCDWKVDCRDSSDEINCTEICLHNEFSCGNGECIPRAYVCDHDNDCQDGSDEHACNYPTCGGYQFTCPSGRCIYQNWVCDGEDDCKDNGDEDGCESGPHDVHKCSPREWSCPESGRCISIYKVCDGILDCPGREDENNTSTGKYCSMTLCSALNCQYQCHETPYGGACFCPPGYIINHNDSRTCVEFDDCQIWGICDQKCESRPGRHLCHCEEGYILERGQYCKANDSFGEASIIFSNGRDLLIGDIHGRSFRILVESQNRGVAVGVAFHYHLQRVFWTDTVQNKVFSVDINGLNIQEVLNVSVETPENLAVDWVNNKIYLVETKVNRIDMVNLDGSYRVTLITENLGHPRGIAVDPTVGYLFFSDWESLSGEPKLERAFMDGSNRKDLVKTKLGWPAGVTLDMISKRVYWVDSRFDYIETVTYDGIQRKTVVHGGSLIPHPFGVSLFEGQVFFTDWTKMAVLKANKFTETNPQVYYQASLRPYGVTVYHSLRQPYATNPCKDNNGGCEQVCVLSHRTDNDGLGFRCKCTFGFQLDTDERHCIAVQNFLIFSSQVAIRGIPFTLSTQEDVMVPVSGNPSFFVGIDFDAQDSTIFFSDMSKHMIFKQKIDGTGREILAANRVENVESLAFDWISKNLYWTDSHYKSISVMRLADKTRRTVVQYLNNPRSVVVHPFAGYLFFTDWFRPAKIMRAWSDGSHLLPVINTTLGWPNGLAIDWAASRLYWVDAYFDKIEHSTFDGLDRRRLGHIEQMTHPFGLAIFGEHLFFTDWRLGAIIRVRKADGGEMTVIRSGIAYILHLKSYDVNIQTGSNACNQPTHPNGDCSHFCFPVPNFQRVCGCPYGMRLASNHLTCEGDPTNEPPTEQCGLFSFPCKNGRCVPNYYLCDGVDDCHDNSDEQLCGTLNNTCSSSAFTCGHGECIPAHWRCDKRNDCVDGSDEHNCPTHAPASCLDTQYTCDNHQCISKNWVCDTDNDCGDGSDEKNCNSTETCQPSQFNCPNHRCIDLSFVCDGDKDCVDGSDEVGCVLNCTASQFKCASGDKCIGVTNRCDGVFDCSDNSDEAGCPTRPPGMCHSDEFQCQEDGICIPNFWECDGHPDCLYGSDEHNACVPKTCPSSYFHCDNGNCIHRAWLCDRDNDCGDMSDEKDCPTQPFRCPSWQWQCLGHNICVNLSVVCDGIFDCPNGTDESPLCNGNSCSDFNGGCTHECVQEPFGAKCLCPLGFLLANDSKTCEDIDECDILGSCSQHCYNMRGSFRCSCDTGYMLESDGRTCKVTASESLLLLVASQNKIIADSVTSQVHNIYSLVENGSYIVAVDFDSISGRIFWSDATQGKTWSAFQNGTDRRVVFDSSIILTETIAIDWVGRNLYWTDYALETIEVSKIDGSHRTVLISKNLTNPRGLALDPRMNEHLLFWSDWGHHPRIERASMDGSMRTVIVQDKIFWPCGLTIDYPNRLLYFMDSYLDYMDFCDYNGHHRRQVIASDLIIRHPYALTLFEDSVYWTDRATRRVMRANKWHGGNQSVVMYNIQWPLGIVAVHPSKQPNSVNPCAFSRCSHLCLLSSQGPHFYSCVCPSGWSLSPDLLNCLRDDQPFLITVRQHIIFGISLNPEVKSNDAMVPIAGIQNGLDVEFDDAEQYIYWVENPGEIHRVKTDGTNRTVFASISMVGPSMNLALDWISRNLYSTNPRTQSIEVLTLHGDIRYRKTLIANDGTALGVGFPIGITVDPARGKLYWSDQGTDSGVPAKIASANMDGTSVKTLFTGNLEHLECVTLDIEEQKLYWAVTGRGVIERGNVDGTDRMILVHQLSHPWGIAVHDSFLYYTDEQYEVIERVDKATGANKIVLRDNVPNLRGLQVYHRRNAAESSNGCSNNMNACQQICLPVPGGLFSCACATGFKLNPDNRSCSPYNSFIVVSMLSAIRGFSLELSDHSETMVPVAGQGRNALHVDVDVSSGFIYWCDFSSSVASDNAIRRIKPDGSSLMNIVTHGIGENGVRGIAVDWVAGNLYFTNAFVSETLIEVLRINTTYRRVLLKVTVDMPRHIVVDPKNRYLFWADYGQRPKIERSFLDCTNRTVLVSEGIVTPRGLAVDRSDGYVYWVDDSLDIIARIRINGENSEVIRYGSRYPTPYGITVFENSIIWVDRNLKKIFQASKEPENTEPPTVIRDNINWLRDVTIFDKQVQPRSPAEVNNNPCLENNGGCSHLCFALPGLHTPKCDCAFGTLQSDGKNCAISTENFLIFALSNSLRSLHLDPENHSPPFQTINVERTVMSLDYDSVSDRIYFTQNLASGVGQISYATLSSGIHTPTVIASGIGTADGIAFDWITRRIYYSDYLNQMINSMAEDGSNRTVIARVPKPRAIVLDPCQGYLYWADWDTHAKIERATLGGNFRVPIVNSSLVMPSGLTLDYEEDLLYWVDASLQRIERSTLTGVDREVIVNAAVHAFGLTLYGQYIYWTDLYTQRIYRANKYDGSGQIAMTTNLLSQPRGINTVVKNQKQQCNNPCEQFNGGCSHICAPGPNGAECQCPHEGNWYLANNRKHCIVDNGERCGASSFTCSNGRCISEEWKCDNDNDCGDGSDEMESVCALHTCSPTAFTCANGRCVQYSYRCDYYNDCGDGSDEAGCLFRDCNATTEFMCNNRRCIPREFICNGVDNCHDNNTSDEKNCPDRTCQSGYTKCHNSNICIPRVYLCDGDNDCGDNSDENPTYCTTHTCSSSEFQCASGRCIPQHWYCDQETDCFDASDEPASCGHSERTCLADEFKCDGGRCIPSEWICDGDNDCGDMSDEDKRHQCQNQNCSDSEFLCVNDRPPDRRCIPQSWVCDGDVDCTDGYDENQNCTRRTCSENEFTCGYGLCIPKIFRCDRHNDCGDYSDERGCLYQTCQQNQFTCQNGRCISKTFVCDEDNDCGDGSDELMHLCHTPEPTCPPHEFKCDNGRCIEMMKLCNHLDDCLDNSDEKGCGINECHDPSISGCDHNCTDTLTSFYCSCRPGYKLMSDKRTCVDIDECTEMPFVCSQKCENVIGSYICKCAPGYLREPDGKTCRQNSNIEPYLIFSNRYYLRNLTIDGYFYSLILEGLDNVVALDFDRVEKRLYWIDTQRQVIERMFLNKTNKETIINHRLPAAESLAVDWVSRKLYWLDARLDGLFVSDLNGGHRRMLAQHCVDANNTFCFDNPRGLALHPQYGYLYWADWGHRAYIGRVGMDGTNKSVIISTKLEWPNGITIDYTNDLLYWADAHLGYIEYSDLEGHHRHTVYDGALPHPFAITIFEDTIYWTDWNTRTVEKGNKYDGSNRQTLVNTTHRPFDIHVYHPYRQPIVSNPCGTNNGGCSHLCLIKPGGKGFTCECPDDFRTLQLSGSTYCMPMCSSTQFLCANNEKCIPIWWKCDGQKDCSDGSDELALCPQRFCRLGQFQCSDGNCTSPQTLCNAHQNCPDGSDEDRLLCENHHCDSNEWQCANKRCIPESWQCDTFNDCEDNSDEDSSHCASRTCRPGQFRCANGRCIPQAWKCDVDNDCGDHSDEPIEECMSSAHLCDNFTEFSCKTNYRCIPKWAVCNGVDDCRDNSDEQGCEERTCHPVGDFRCKNHHCIPLRWQCDGQNDCGDNSDEENCAPRECTESEFRCVNQQCIPSRWICDHYNDCGDNSDERDCEMRTCHPEYFQCTSGHCVHSELKCDGSADCLDASDEADCPTRFPDGAYCQATMFECKNHVCIPPYWKCDGDDDCGDGSDEELHLCLDVPCNSPNRFRCDNNRCIYSHEVCNGVDDCGDGTDETEEHCRKPTPKPCTEYEYKCGNGHCIPHDNVCDDADDCGDWSDELGCNKGKERTCAENICEQNCTQLNEGGFICSCTAGFETNVFDRTSCLDINECEQFGTCPQHCRNTKGSYECVCADGFTSMSDRPGKRCAAEGSSPLLLLPDNVRIRKYNLSSERFSEYLQDEEYIQAVDYDWDPKDIGLSVVYYTVRGEGSRFGAIKRAYIPNFESGRNNLVQEVDLKLKYVMQPDGIAVDWVGRHIYWSDVKNKRIEVAKLDGRYRKWLISTDLDQPAAIAVNPKLGLMFWTDWGKEPKIESAWMNGEDRNILVFEDLGWPTGLSIDYLNNDRIYWSDFKEDVIETIKYDGTDRRVIAKEAMNPYSLDIFEDQLYWISKEKGEVWKQNKFGQGKKEKTLVVNPWLTQVRIFHQLRYNKSVPNLCKQICSHLCLLRPGGYSCACPQGSSFIEGSTTECDAAIELPINLPPPCRCMHGGNCYFDETDLPKCKCPSGYTGKYCEMAFSKGISPGTT

SEQ ID NO: 2676 - protein, 496 aa, synthetic construct
  REGION 1..496: note = LRP3 (O75074) SP+PP+ECD
MEKRAAAGLEGAPGARAQLAVVCLVNIFLTGRLSSAVPALAACSGKLEQHTERRGVIYSPAWPLNYPPGTNCSWYIQGDRGDMITISFRNFDVEESHQCSLDWLLLGPAAPPRQEAFRLCGSAIPPAFISARDHVWIFFHSDASSSGQAQGFRLSYIRGKLGQASCQADEFRCDNGKCLPGPWQCNTVDECGDGSDEGNCSAPASEPPGSLCPGGTFPCSGARSTRCLPVERRCDGLQDCGDGSDEAGCPDLACGRRLGSFYGSFASPDLFGAARGPSDLHCTWLVDTQDSRRVLLQLELRLGYDDYVQVYEGLGERGDRLLQTLSYRSNHRPVSLEAAQGRLTVAYHARARSAGHGFNATYQVKGYCLPWEQPCGSSSDSDGGSLGDQGCFSEPQRCDGWWHCASGRDEQGCPACPPDQYPCEGGSGLCYTPADRCNNQKSCPDGADEKNCFSCQPGTFHCGTNLCIFETWRCDGQEDCQDGSDEHGCLAAVPRK

SEQ ID NO: 2677 - protein, 1725 aa, synthetic construct
  REGION 1..1725: note = LRP4 (O75096) SP+PP+ECD
MRRQWGALLLGALLCAHGLASSPECACGRSHFTCAVSALGECTCIPAQWQCDGDNDCGDHSDEDGCILPTCSPLDFHCDNGKCIRRSWVCDGDNDCEDDSDEQDCPPRECEEDEFPCQNGYCIRSLWHCDGDNDCGDNSDEQCDMRKCSDKEFRCSDGSCIAEHWYCDGDTDCKDGSDEENCPSAVPAPPCNLEEFQCAYGRCILDIYHCDGDDDCGDWSDESDCSSHQPCRSGEFMCDSGLCINAGWRCDGDADCDDQSDERNCTTSMCTAEQFRCHSGRCVRLSWRCDGEDDCADNSDEENCENTGSPQCALDQFLCWNGRCIGQRKLCNGVNDCGDNSDESPQQNCRPRTGEENCNVNNGGCAQKCQMVRGAVQCTCHTGYRLTEDGHTCQDVNECAEEGYCSQGCTNSEGAFQCWCETGYELRPDRRSCKALGPEPVLLFANRIDIRQVLPHRSEYTLLLNNLENAIALDFHHRRELVFWSDVTLDRILRANLNGSNVEEVVSTGLESPGGLAVDWVHDKLYWTDSGTSRIEVANLDGAHRKVLLWQNLEKPRAIALHPMEGTIYWTDWGNTPRIEASSMDGSGRRIIADTHLFWPNGLTIDYAGRRMYWVDAKHHVIERANLDGSHRKAVISQGLPHPFAITVFEDSLYWTDWHTKSINSANKFTGKNQEIIRNKLHFPMDIHTLHPQRQPAGKNRCGDNNGGCTHLCLPSGQNYTCACPTGFRKISSHACAQSLDKFLLFARRMDIRRISFDTEDLSDDVIPLADVRSAVALDWDSRDDHVYWTDVSTDTISRAKWDGTGQEVVVDTSLESPAGLAIDWVTNKLYWTDAGTDRIEVANTDGSMRTVLIWENLDRPRDIVVEPMGGYMYWTDWGASPKIERAGMDASGRQVIISSNLTWPNGLAIDYGSQRLYWADAGMKTIEFAGLDGSKRKVLIGSQLPHPFGLTLYGERIYWTDWQTKSIQSADRLTGLDRETLQENLENLMDIHVFHRRRPPVSTPCAMENGGCSHLCLRSPNPSGFSCTCPTGINLLSDGKTCSPGMNSFLIFARRIDIRMVSLDIPYFADVVVPINITMKNTIAIGVDPQEGKVYWSDSTLHRISRANLDGSQHEDIITTGLQTTDGLAVDAIGRKVYWTDTGTNRIEVGNLDGSMRKVLVWQNLDSPRAIVLYHEMGFMYWTDWGENAKLERSGMDGSDRAVLINNNLGWPNGLTVDKASSQLLWADAHTERIEAADLNGANRHTLVSPVQHPYGLTLLDSYIYWTDWQTRSIHRADKGTGSNVILVRSNLPGLMDMQAVDRAQPLGFNKCGSRNGGCSHLCLPRPSGFSCACPTGIQLKGDGKTCDPSPETYLLFSSRGSIRRISLDTSDHTDVHVPVPELNNVISLDYDSVDGKVYYTDVFLDVIRRADLNGSNMETVIGRGLKTTDGLAVDWVARNLYWTDTGRNTIEASRLDGSCRKVLINNSLDEPRAIAVFPRKGYLFWTDWGHIAKIERANLDGSERKVLINTDLGWPNGLTLDYDTRRIYWVDAHLDRIESADLNGKLRQVLVSHVSHPFALTQQDRWIYWTDWQTKSIQRVDKYSGRNKETVLANVEGLMDIIVVSPQRQTGTNACGVNNGGCTHLCFARASDFVCACPDEPDSRPCSLVPGLVPPAPRATGMSEKSPVLPNTPPTTLYSSTTRTRTSLEEVEGRCSERDARLGLCARSNDAVPAAPGEGLHIS

SEQ ID NO: 2678 - protein, 1384 aa, synthetic construct
  REGION 1..1384: note = LRP5 (O75197) SP+PP+ECD
MEAAPPGPPWPLLLLLLLLLALCGCPAPAAASPLLLFANRRDVRLVDAGGVKLESTIVVSGLEDAAAVDFQFSKGAVYWTDVSEEAIKQTYLNQTGAAVQNVVISGLVSPDGLACDWVGKKLYWTDSETNRIEVANLNGTSRKVLFWQDLDQPRAIALDPAHGYMYWTDWGETPRIERAGMDGSTRKIIVDSDIYWPNGLTIDLEEQKLYWADAKLSFIHRANLDGSFRQKVVEGSLTHPFALTLSGDTLYWTDWQTRSIHACNKRTGGKRKEILSALYSPMDIQVLSQERQPFFHTRCEEDNGGCSHLCLLSPSEPFYTCACPTGVQLQDNGRTCKAGAEEVLLLARRTDLRRISLDTPDFTDIVLQVDDIRHAIAIDYDPLEGYVYWTDDEVRAIRRAYLDGSGAQTLVNTEINDPDGIAVDWVARNLYWTDTGTDRIEVTRLNGTSRKILVSEDLDEPRAIALHPVMGLMYWTDWGENPKIECANLDGQERRVLVNASLGWPNGLALDLQEGKLYWGDAKTDKIEVINVDGTKRRTLLEDKLPHIFGFTLLGDFIYWTDWQRRSIERVHKVKASRDVIIDQLPDLMGLKAVNVAKVVGTNPCADRNGGCSHLCFFTPHATRCGCPIGLELLSDMKTCIVPEAFLVFTSRAAIHRISLETNNNDVAIPLTGVKEASALDFDVSNNHIYWTDVSLKTISRAFMNGSSVEHVVEFGLDYPEGMAVDWMGKNLYWADTGTNRIEVARLDGQFRQVLVWRDLDNPRSLALDPTKGYIYWTEWGGKPRIVRAFMDGTNCMTLVDKVGRANDLTIDYADQRLYWTDLDTNMIESSNMLGQERVVIADDLPHPFGLTQYSDYIYWTDWNLHSIERADKTSGRNRTLIQGHLDFVMDILVFHSSRQDGLNDCMHNNGQCGQLCLAIPGGHRCGCASHYTLDPSSRNCSPPTTFLLFSQKSAISRMIPDDQHSPDLILPLHGLRNVKAIDYDPLDKFIYWVDGRQNIKRAKDDGTQPFVLTSLSQGQNPDRQPHDLSIDIYSRTLFWTCEATNTINVHRLSGEAMGVVLRGDRDKPRAIVVNAERGYLYFTNMQDRAAKIERAALDGTEREVLFTTGLIRPVALVVDNTLGKLFWVDADLKRIESCDLSGANRLTLEDANIVQPLGLTILGKHLYWIDRQQQMIERVEKTTGDKRTRIQGRVAHLTGIHAVEEVSLEEFSAHPCARDNGGCSHICIAKGDGTPRCSCPVHLVLLQNLLTCGEPPTCSPDQFACATGEIDCIPGAWRCDGFPECDDQSDEEGCPVCSAAQFPCARGQCVDLRLRCDGEADCQDRSDEADCDAICLPNQFRCASGQCVLIKQQCDSFPDCIDGSDELMCEITKPPSDDSPAHS

SEQ ID NO: 2679 - protein, 1370 aa, synthetic construct
  REGION 1..1370: note = LRP6 (O75581) SP+PP+ECD
MGAVLRSLLACSFCVLLRAAPLLLYANRRDLRLVDATNGKENATIVVGGLEDAAAVDFVFSHGLIYWSDVSEEAIKRTEFNKTESVQNVVVSGLLSPDGLACDWLGEKLYWTDSETNRIEVSNLDGSLRKVLFWQELDQPRAIALDPSSGFMYWTDWGEVPKIERAGMDGSSRFIIINSEIYWPNGLTLDYEEQKLYWADAKLNFIHKSNLDGTNRQAVVKGSLPHPFALTLFEDILYWTDWSTHSILACNKYTGEGLREIHSDIFSPMDIHAFSQQRQPNATNPCGIDNGGCSHLCLMSPVKPFYQCACPTGVKLLENGKTCKDGATELLLLARRTDLRRISLDTPDFTDIVLQLEDIRHAIAIDYDPVEGYIYWTDDEVRAIRRSFIDGSGSQFVVTAQIAHPDGIAVDWVARNLYWTDTGTDRIEVTRLNGTMRKILISEDLEEPRAIVLDPMVGYMYWTDWGEIPKIERAALDGSDRVVLVNTSLGWPNGLALDYDEGKIYWGDAKTDKIEVMNTDGTGRRVLVEDKIPHIFGFTLLGDYVYWTDWQRRSIERVHKRSAEREVIIDQLPDLMGLKATNVHRVIGSNPCAEENGGCSHLCLYRPQGLRCACPIGFELISDMKTCIVPEAFLLFSRRADIRRISLETNNNNVAIPLTGVKEASALDFDVTDNRIYWTDISLKTISRAFMNGSALEHVVEFGLDYPEGMAVDWLGKNLYWADTGTNRIEVSKLDGQHRQVLVWKDLDSPRALALDPAEGFMYWTEWGGKPKIDRAAMDGSERTTLVPNVGRANGLTIDYAKRRLYWTDLDTNLIESSNMLGLNREVIADDLPHPFGLTQYQDYIYWTDWSRRSIERANKTSGQNRTIIQGHLDYVMDILVFHSSRQSGWNECASSNGHCSHLCLAVPVGGFVCGCPAHYSLNADNRTCSAPTTFLLFSQKSAINRMVIDEQQSPDIILPIHSLRNVRAIDYDPLDKQLYWIDSRQNMIRKAQEDGSQGFTVVVSSVPSQNLEIQPYDLSIDIYSRYIYWTCEATNVINVTRLDGRSVGVVLKGEQDRPRAVVVNPEKGYMYFTNLQERSPKIERAALDGTEREVLFFSGLSKPIALALDSRLGKLFWADSDLRRIESSDLSGANRIVLEDSNILQPVGLTVFENWLYWIDKQQQMIEKIDMTGREGRTKVQARIAQLSDIHAVKELNLQEYRQHPCAQDNGGCSHICLVKGDGTTRCSCPMHLVLLQDELSCGEPPTCSPQQFTCFTGEIDCIPVAWRCDGFTECEDHSDELNCPVCSESQFQCASGQCIDGALRCNGDANCQDKSDEKNCEVLCLIDQFRCANGQCIGKHKKCDHNVDCSDKSDELDCYPTEEPAPQA

SEQ ID NO: 2680 - protein, 817 aa, synthetic construct
  REGION 1..817: note = LRP8 (Q14114) SP+PP+ECD
MGLPEPGPLRLLALLLLLLLLLLLQLQHLAAAGPAKDCEKDQFQCRNERCIPSVWRCDEDDDCLDHSDEDDCPKKTCADSDFTCDNGHCIHERWKCDGEEECPDGSDESEATCTKQVCPAEKLSCGPTSHKCVPASWRCDGEKDCEGGADEAGCATLCAPHEFQCGNRSCLAAVFVCDGDDDCGDGSDERGCADPACGPREFRCGGDGGGACIPERWVCDRQFDCEDRSDEAAELCGRPGPGATSAPAACATASQFACRSGECVHLGWRCDGDRDCKDKSDEADCPLGTCRGDEFQCGDGTCVLAIKHCNQEQDCPDGSDEAGCLQGLNECLHNNGGCSHICTDLKIGFECTCPAGFQLLDQKTCGDIDECKDPDACSQICVNYKGYFKCECYPGYEMDLLTKNCKAAAGKSPSLIFTNRHEVRRIDLVKRNYSRLIPMLKNVVALDVEVATNRIYWCDLSYRKIYSAYMDKASDPKEQEVLIDEQLHSPEGLAVDWVHKHIYWTDSGNKTISVATVDGGRRRTLFSRNLSEPRAIAVDPLRGFMYWSDWGDQAKIEKSGLNGVDRQTLVSDNIEWPNGITLDLLSQRLYWVDSKLHQLSSIDFSGGNRKTLISSTDFLSHPFGIAVFEDKVFWTDLENEAIFSANRLNGLEISILAENLNNPHDIVIFHELKQPRAPDACELSVQPNGGCEYLCLPAPQISSHSPKYTCACPDTMWLGPDMKRCYRAPQSTSTTTLASTMTRTVPATTRAPGTTVHRSTYQNHSTETPSLTAAVPSSVSVPRAPSISPSTLSPATSNHSQHYANEDSKMGSTVTAA

SEQ ID NO: 2681 - protein, 538 aa, synthetic construct
  REGION 1..538: note = LRRC15 (Q8TF66) SP+PP+ECD
MPLKHYLLLLVGCQAWGAGLAYHGCPSECTCSRASQVECTGARIVAVPTPLPWNAMSLQILNTHITELNESPFLNISALIALRIEKNELSRITPGAFRNLGSLRYLSLANNKLQVLPIGLFQGLDSLESLLLSSNQLLQIQPAHFSQCSNLKELQLHGNHLEYIPDGAFDHLVGLTKLNLGKNSLTHISPRVFQHLGNLQVLRLYENRLTDIPMGTFDGLVNLQELALQQNQIGLLSPGLFHNNHNLQRLYLSNNHISQLPPSVFMQLPQLNRLTLFGNSLKELSPGIFGPMPNLRELWLYDNHISSLPDNVFSNLRQLQVLILSRNQISFISPGAFNGLTELRELSLHTNALQDLDGNVFRMLANLQNISLQNNRLRQLPGNIFANVNGLMAIQLQNNQLENLPLGIFDHLGKLCELRLYDNPWRCDSDILPLRNWLLLNQPRLGTDTVPVCFSPANVRGQSLIIINVNVAVPSVHVPEVPSYPETPWYPDTPSYPDTTSVSSTTELTSPVEDYTDLTTIQVTDDRSVWGMTQAQSG

SEQ ID NO: 2682 - protein, 270 aa, synthetic construct
  REGION 1..270: note = LRRC19 (Q9H756) SP+PP+ECD
MKVTGITILFWPLSMILLSDKIQSSKREVQCNFTEKNYTLIPADIKKDVTILDLSYNQITLNGTDTRVLQTYFLLTELYLIENKVTILHNNGFGNLSSLEILNICRNSIYVIQQGAFLGLNKLKQLYLCQNKIEQLNADVFVPLRSLKLLNLQGNLISYLDVPPLFHLELITLYGNLWNCSCSLFNLQNWLNTSNVTLENENITMCSYPNSLQSYNIKTVPHKAECHSKFPSSVTEDLYIHFQPISNSIFNSSSNNLTRNSEHEPLGKSW

SEQ ID NO: 2683 - protein, 405 aa, synthetic construct
  REGION 1..405: note = LRRC24 (Q50LG9) SP+PP+ECD
MALRAPALLPLLLLLLPLRAAGCPAACRCYSATVECGALRLRVVPLGIPPGTQTLFLQDNNIARLEPGALAPLAALRRLYLHNNSLRALEAGAFRAQPRLLELALTSNRLRGLRSGAFVGLAQLRVLYLAGNQLARLLDFTFLHLPRLQELHLQENSIELLEDQALAGLSSLALLDLSRNQLGTISREALQPLASLQVLRLTENPWRCDCALHWLGAWIKEGGQRLLTSRDRKIMCAEPPRLALQSLLDVSHSSLICIPPSVHVQPLELTANLGEDLRVACQASGYPQPLVTWRKVPQPREGRPRAQAQLEGGLLGLGGHSASDTGSGMLFLSNITLAHAGKYECEASNAGGAARVPFRLLVNASRQQPQQPAQPPPPAARPAGSEPRPEAGSMAFRALGVATQT

SEQ ID NO: 2684 - protein, 165 aa, synthetic construct
  REGION 1..165: note = LRRC25 (Q8N386) SP+PP+ECD
MGGTLAWTLLLPLLLRESDSLEPSCTVSSADVDWNAEFSATCLNFSGLSLSLPHNQSLRASNVILLDLSGNGLRELPVTFFAHLQKLEVLNVLRNPLSRVDGALAARCDLDLQADCNCALESWHDIRRDNCSGQKPLLCWDTTSSQHNLSAFLEVSCAPGLASAT

SEQ ID NO: 2685 - protein, 627 aa, synthetic construct
  REGION 1..627: note = LRRC32 (Q14392) SP+PP+ECD
MRPQILLLLALLTLGLAAQHQDKVPCKMVDKKVSCQVLGLLQVPSVLPPDTETLDLSGNQLRSILASPLGFYTALRHLDLSTNEISFLQPGAFQALTHLEHLSLAHNRLAMATALSAGGLGPLPRVTSLDLSGNSLYSGLLERLLGEAPSLHTLSLAENSLTRLTRHTFRDMPALEQLDLHSNVLMDIEDGAFEGLPRLTHLNLSRNSLTCISDFSLQQLRVLDLSCNSIEAFQTASQPQAEFQLTWLDLRENKLLHFPDLAALPRLIYLNLSNNLIRLPTGPPQDSKGIHAPSEGWSALPLSAPSGNASGRPLSQLLNLDLSYNEIELIPDSFLEHLTSLCFLNLSRNCLRTFEARRLGSLPCLMLLDLSHNALETLELGARALGSLRTLLLQGNALRDLPPYTFANLASLQRLNLQGNRVSPCGGPDEPGPSGCVAFSGITSLRSLSLVDNEIELLRAGAFLHTPLTELDLSSNPGLEVATGALGGLEASLEVLALQGNGLMVLQVDLPCFICLKRLNLAENRLSHLPAWTQAVSLEVLDLRNNSFSLLPGSAMGGLETSLRRLYLQGNPLSCCGNGWLAAQLHQGRVDVDATQDLICRFSSQEEVSLSHVRPEDCEKGGLKNIN

SEQ ID NO: 2686 - protein, 1582 aa, synthetic construct
  REGION 1..1582: note = LRRC37A (A6NMS7) SP+PP+ECD
MSSAQCPALVCVMSRLRFWGPWPLLMWQLLWLLVKEAQPLEWVKDPLQLTSNPLGPPESWSSHSSHFPRESPHAPTLPADPWDFDHLGPSASSEMPAPPQESTENLVPFLDTWDSAGEQPLEPEQFLASQQDLKDKLSPQERLPVSPKKLKKDPAQRWSLAEIIGITRQLSTPQSQKQTLQNEYSSTDTPYPGSLPPELRVKSDEPPGPSEQVGPSQFHLEPETQNPETLEDIQSSSLQQEAPAQLPQLLEEEPSSMQQEAPALPPESSMESLTLPNHEVSVQPPGEDQAYYHLPNITVKPADVEVTITSEPTNETESSQAQQETPIQFPEEVEPSATQQEAPIEPPVPPMEHELSISEQQQPVQPSESPREVESSPTQQETPGQPPEHHEVTVSPPGHHQTHHLASPSVSVKPPDVQLTIAAEPSAEVGTSLVHQEATTRLSGSGNDVEPPAIQHGGPPLLPESSEEAGPLAVQQETSFQSPEPINNENPSPTQQEAAAEHPQTAEEGESSLTHQEAPAQTPEFPNVVVAQPPEHSHLTQATVQPLDLGFTITPESKTEVELSPTMKETPTQPPKKVVPQLRVYQGVTNPTPGQDQAQHPVSPSVTVQLLDLGLTITPEPTTEVGHSTPPKRTIVSPKHPEVTLPHPDQVQTQHSHLTRATVQPLDLGFTITPKSMTEVEPSTALMTTAPPPGHPEVTLPPSDKGQAQHSHLTQATVQPLDLELTITTKPTTEVKPSPTTEETSTQPPDLGLAIIPEPTTETGHSTALEKTTAPRPDRVQTLHRSLTEVTGPPTELEPAQDSLVQSESYTQNKALTAPEEHKASTSTNICELCTCGDEMLSCIDLNPEQRLRQVPVPEPNTHNGTFTILNFQGNYISYIDGNVWKAYSWTEKLILRENNLTELHKDSFEGLLSLQYLDLSCNKIQSIERHTFEPLPFLKFINLSCNVITELSFGTFQAWHGMQFLHKLILNHNPLTTVEDPYLFKLPALKYLDMGTTLVPLTTLKNILMMTVELEKLILPSHMACCLCQFKNSIEAVCKTVKLHCNSACLTNTTHCPEEASVGNPEGAFMKVLQARKNYTSTELIVEPEEPSDSSGINLSGFGSEQLDTNDESDFISTLSYILPYFSAVNLDVKSLLLPFIKLPTTGNSLAKIQTVGQNRQRVKRVLMGPRSIQKRHFKEVGRQSIRREQGAQASVENAAEEKRLTSPAPREVEQPHTQQGPEKLAGNAVYTKPSFTQEHKAAVSVLKPFSKGTPSTSSPAKALPQVRDRSKDLTHAISILESAKARVTNTKTSKPIVHARKKYRFHKTRSHVTHRTTKVKKSPKVRKKSYLSRLMLANRLPFSAAKSLINSPSQGAFSSLGDLSPQENPFLEVSALSEHFIEKNNTKHTTARNAFEENDFMENTNMPEGTISENTNYNHPPEADSAGTAFNLGPTVKQTETKWEYNNVGTDLSPEPKSFNYPLLSSPGDQFEIQLTQQLQSLIPNNNVRRLIAHVIRTLKMDCSGAHVQVTCAKLISRTGHLMKLLSGQQEVKASKIEWDTDQWKIENYINESTEAQSEQKEKSLELKKEVPGYGYTDKL

SEQ ID NO: 2687 - protein, 1582 aa, synthetic construct
  REGION 1..1582: note = LRRC37A2 (A6NM11) SP+PP+ECD
MSSAQCPALVCVMSRLRFWGPWPLLMWQLLWLLVKEAQPLEWVKDPLQLTSNPLGPPDSWSSHSSHFPRESPHAPTLPADPWDFDHLGPSASSEMPAPPQESTENLVPFLDTWDSAGEQPLEPEQFLASQQDLKDKLSPQERLPVSPKKLKKDPAQRWSLAEIIGITRQLSTPQSQKQTLQNEYSSTDTPYPGSLPPELRVKSDEPPGPSEQVGPSQFHLEPETQNPETLEDIQSSSLQQEAPAQLPQLLEEEPSSMQQEAPALPPESSMESLTLPNHEVSVQPPGEDQAYYHLPNITVKPADVEVTITSEPTNETESSQAQQETPIQFPEEVEPSATQQEAPIEPPVPPMEHELSISEQQQPVQPSESPREVESSPTQQETPGQPPEHHEVTVSPPGHHQTHHLASPSVSVKPPDVQLTIAAEPSAEVGTSLVHQEATTRLSGSGNDVEPPAIQHGGPPLLPESSEEAGPLAVQQETSFQSPEPINNENPSPTQQEAAAEHPQTAEEGESSLTHQEAPAQTPEFPNVVVAQPPEHSHLTQATVQPLDLGFTITPESKTEVELSPTMKETPTQPPKKVVPQLRVYQGVTNPTPGQDQAQHPVSPSVTVQLLDLGLTITPEPTTEVGHSTPPKRTIVSPKHPEVTLPHPDQVQTQHSHLTRATVQPLDLGFTITPKSMTEVEPSTALMTTAPPPGHPEVTLPPSDKGQAQHSHLTQATVQPLDLELTITTKPTTEVKPSPTTEETSTQPPDLGLAIIPEPTTETRHSTALEKTTAPRPDRVQTLHRSLTEVTGPPTELEPAQDSLVQSESYTQNKALTAPEEHKASTSTNICELCTCGDEMLSCIDLNPEQRLRQVPVPEPNTHNGTFTILNFQGNYISYIDGNVWKAYSWTEKLILRENNLTELHKDSFEGLLSLQYLDLSCNKIQSIERHTFEPLPFLKFINLSCNVITELSFGTFQAWHGMQFLHKLILNHNPLTTVEDPYLFKLPALKYLDMGTTLVPLTTLKNILMMTVELEKLILPSHMACCLCQFKNSIEAVCKTVKLHCNSACLTNTTHCPEEASVGNPEGAFMKVLQARKNYTSTELIVEPEEPSDSSGINLSGFGSEQLDTNDESDFISTLSYILPYFSAVNLDVKSLLLPFIKLPTTGNSLAKIQTVGQNRQRVKRVLMGPRSIQKRHFKEVGRQSIRREQGAQASVENAAEEKRLGSPAPREVEQPHTQQGPEKLAGNAVYTKPSFTQEHKAAVSVLKPFSKGAPSTSSPAKALPQVRDRWKDLTHAISILESAKARVTNTKTSKPIVHARKKYRFHKTRSHVTHRTPKVKKSPKVRKKSYLSRLMLANRLPFSAAKSLINSPSQGAFSSLGDLSPQENPFLEVSAPSEHFIENNNTKHTTARNAFEENDFMENTNMPEGTISENTNYNHPHEADSAGTAFNLGPTVKQTETKWEYNNVGTDLSPEPKSFNYPLLSSPGDQFEIQLTQQLQSLIPNNNVRRLIAHVIRTLKMDCSGAHVQVTCAKLISRTGHLMKLLSGQQEVKASKIEWDTDQWKIENYINESTEAQSEQKEKSLELKKEVPGYGYTDKL

SEQ ID NO: 2688 - protein, 1581 aa, synthetic construct
  REGION 1..1581: note = LRRC37A3 (O60309) SP+PP+ECD
MTSAQCPALACVMSPLRFWGPWPLLMWQLLWLLVKEAQPLEWVKDPLQLTSNPLGPPEPWSSHSSHFPRESPHAPTLPADPWDFDHLGPSASSEMPAPPQESTENLVPFLDTWDSAGELPLEPEQFLASQQDLKDKLSPQERLPVSPKKLKKDPAQRWSLAEIIGIIHQLSTPQSQKQTLQNEYSSTDTPYPGSLPPELRVKSDEPPGPSEQVGPSQFHLEPETQNPETLEDIQSSSLQQEAPAQLPQLLEEEPSSMQQEAPALPPESSMESLTLPNHEVSVQPPGEDQAYYHLPNITVKPADVEVTITSEPTNETESSQAQQETPIQFPEEVEPSATQQEAPIEPPVPPMEHELSISEQQQPVQPSESSREVESSPTQQETPGQPPEHHEVTVSPPGHHQTHHLASPSVSVKPPDVQLTIAAEPSAEVGTSLVHQEATTRLSGSGNDVEPPAIQHGGPPLLPESSEEAGPLAVQQETSFQSPEPINNENPSPTQQEAAAEHPQTAEEGESSLTHQEAPAQTPEFPNVVVAQPPEHSHLTQATVQPLDLGFTITPESMTEVELSPTMKETPTQPPKKVVPQLRVYQGVTNPTPGQDQAQHPVSPSVTVQLLDLGLTITPEPTTEVGHSTPPKRTIVSPKHPEVTLPHPDQVQTQHSHLTRATVQPLDLGFTITPKSMTEVEPSTALMTTAPPPGHPEVTLPPSDKGQAQHSHLTQATVQPLDLELTITTKPTTEVKPSPTTEETSTQLPDLGLAIIPEPTTETGHSTALEKTTAPRPDRVQTLHRSLTEVTGPPTELEPAQDSLVQSESYTQNKALTAPEEHKASTSTNICELCTCGDEMLSCIDLNPEQRLRQVPVPEPNTHNGTFTILNFQGNYISYIDGNVWKAYSWTEKLILRENNLTELHKDSFEGLLSLQYLDLSCNKIQSIERHTFEPLPFLKFINLSCNVITELSFGTFQAWHGMQFLHKLILNHNPLTTVEDPYLFKLPALKYLDMGTTLVPLTTLKNILMMTVELEKLIVPSHMACCLCQFKNSIEAVCKTVKLHCNSACLTNTTHCPEEASVGNPEGAFMKVLQARKNYTSTELIIEPEEPSDSSGINLSGFGSEQLDTNDESDVTSTLSYILPYFSAVNLDVKSLLLPFIKLPTTGNSLAKIQTVGKNRQRLNRVLMGPRSIQKRHFKEVGRQSIRREQGAQASVENTAEEKRLGSPAPRELKQPHTQQGPEKLAGNAVYTKPSFTQEHKAAVSVLKPFSKGAPSTSSPAKALPQVRDRWKDLTHAISILESAKARVTNMKTSKPIVHSRKKYRFHKTRSRMTHRTPKVKKSPKVRKKSYLSRLMLSNRLPFSAAKSLINSPSQGAFSSLRDLSPQENPFLEVSAPSEHFIENNNTKDTTARNAFEENVFMENTNMPEGTISENTNYNHPPEADSAGTAFNLGPTVKQTETKWEYNNVGTDLSPEPKSFNYPLLSSPGDQFEIQLTQQLQSVIPNNNVRRLIAHVIRTLKMDCSGAHVQVTCAKLVSRTGHLMKLLSGQQEVKASKIEWDTDQWKTENYINESTEAQSEQKEKSLEFTKELPGYGYTKK

SEQ ID NO: 2689 - protein, 905 aa, synthetic construct
  REGION 1..905: note = LRRC37B (Q96QE4) SP+PP+ECD
MSWLRFWGPWPLLTWQLLSLLVKEAQPLVWVKDPLQLTSNPLGPPEPWSSRSSHLPWESPHAPAPPAAPGDFDYLGPSASSQMSALPQEPTENLAPFLKELDSAGELPLGPEPFLAAHQDLNDKRTPEERLPEVVPLLNRDQNQALVQLPRLKWVQTTDLDRAAGHQADEILVPLDSKVSRPTKFVVSPKNLKKDLAERWSLPEIVGIPHQLSKPQRQKQTLPDDYLSMDTLYPGSLPPELRVNADEPPGPPEQVGLSQFHLEPKSQNPETLEDIQSSSLQEEAPAQLLQLPQEVEPSTQQEAPALPPESSMESLAQTPLNHEVTVQPPGEDQAHYNLPKFTVKPADVEVTMTSEPKNETESTQAQQEAPIQPPEEAEPSSTALRTTDPPPEHPEVTLPPSDKGQAQHSHLTEATVQPLDLELSITTEPTTEVKPSPTTEETSAQPPDPGLAITPEPTTEIGHSTALEKTRAPHPDQVQTLHRSLTEVTGPPTKLESSQDSLVQSETAPEEQKASTSTNICELCTCGDETLSCVGLSPKQRLRQVPVPEPDTYNGIFTTLNFQGNYISYLDGNVWKAYSWTEKLILSENYLTELPKDSFEGLLYLQYLDLSCNKIRYIERQTFESLPFLQYINLGCNLITKLSLGTFQAWHGMQFLHNLILNRNPLTTVEDPYLFELPALKYLDMGTTHITLTTLKNILTMTVELEKLILPSHMACCLCQFKNSIEAVCKTVKLHCNTACLTNSIHCPEEASVGNPEGAFMKMLQARKQHMSTQLTIESEAPSDSSGINLSGFGGDQLEIQLTEQLRSLIPNEDVRKFMSHVIRTLKMECSETHVQGSCAKLMLRTGLLMKLLSEQQEAKALNVEWDTDQQKTNYINENMEQNEQKEQKSSELMKEVPGDDYKNK

SEQ ID NO: 2690 - protein, 249 aa, synthetic construct
  REGION 1..249: note = LRRC38 (Q5VT99) SP+PP+ECD
MRPRAPACAAAALGLCSLLLLLAPGHACPAGCACTDPHTVDCRDRGLPSVPDPFPLDVRKLLVAGNRIQRIPEDFFIFYGDLVYLDFRNNSLRSLEEGTFSGSAKLVFLDLSYNNLTQLGAGAFRSAGRLVKLSLANNNLVGVHEDAFETLESLQVLELNDNNLRSLSVAALAALPALRSLRLDGNPWLCDCDFAHLFSWIQENASKLPKGLDEIQCSLPMESRRISLRELSEASFSECRFSLSLTDLC

SEQ ID NO: 2691 - protein, 204 aa, synthetic construct
  REGION 1..204: note = LRRC3B (Q96PB8) SP+PP+ECD
MNLVDLWLTRSLSMCLLLQSFVLMILCFHSASMCPKGCLCSSSGGLNVTCSNANLKEIPRDLPPETVLLYLDSNQITSIPNEIFKDLHQLRVLNLSKNGIEFIDEHAFKGVAETLQTLDLSDNRIQSVHKNAFNNLKARARIANNPWHCDCTLQQVLRSMASNHETAHNVICKTSVLDEHAGRPFLNAANDADLCNLPKKTTDY

SEQ ID NO: 2692 - protein, 527 aa, synthetic construct
  REGION 1..527: note = LRRC4 (Q9HBW1) SP+PP+ECD
MKLLWQVTVHHHTWNAILLPFVYLTAQVWILCAAIAAAASAGPQNCPSVCSCSNQFSKVVCTRRGLSEVPQGIPSNTRYLNLMENNIQMIQADTFRHLHHLEVLQLGRNSIRQIEVGAFNGLASLNTLELFDNWLTVIPSGAFEYLSKLRELWLRNNPIESIPSYAFNRVPSLMRLDLGELKKLEYISEGAFEGLFNLKYLNLGMCNIKDMPNLTPLVGLEELEMSGNHFPEIRPGSFHGLSSLKKLWVMNSQVSLIERNAFDGLASLVELNLAHNNLSSLPHDLFTPLRYLVELHLHHNPWNCDCDILWLAWWLREYIPTNSTCCGRCHAPMHMRGRYLVEVDQASFQCSAPFIMDAPRDLNISEGRMAELKCRTPPMSSVKWLLPNGTVLSHASRHPRISVLNDGTLNFSHVLLSDTGVYTCMVTNVAGNSNASAYLNVSTAELNTSNYSFFTTVTVETTEISPEDTTRKYKPVPTTSTGYQPAYTTSTTVLIQTTRVPKQVAVPATDTTDKMQTSLDEVMKTTK

SEQ ID NO: 2693 - protein, 576 aa, synthetic construct
  REGION 1..576: note = LRRC4B (Q9NT99) SP+PP+ECD
MARARGSPCPPLPPGRMSWPHGALLFLWLFSPPLGAGGGGVAVTSAAGGGSPPATSCPVACSCSNQASRVICTRRDLAEVPASIPVNTRYLNLQENGIQVIRTDTFKHLRHLEILQLSKNLVRKIEVGAFNGLPSLNTLELFDNRLTTVPTQAFEYLSKLRELWLRNNPIESIPSYAFNRVPSLRRLDLGELKRLEYISEAAFEGLVNLRYLNLGMCNLKDIPNLTALVRLEELELSGNRLDLIRPGSFQGLTSLRKLWLMHAQVATIERNAFDDLKSLEELNLSHNNLMSLPHDLFTPLHRLERVHLNHNPWHCNCDVLWLSWWLKETVPSNTTCCARCHAPAGLKGRYIGELDQSHFTCYAPVIVEPPTDLNVTEGMAAELKCRTGTSMTSVNWLTPNGTLMTHGSYRVRISVLHDGTLNFTNVTVQDTGQYTCMVTNSAGNTTASATLNVSAVDPVAAGGTGSGGGGPGGSGGVGGGSGGYTYFTTVTVETLETQPGEEALQPRGTEKEPPGPTTDGVWGGGRPGDAAGPASSSTTAPAPRSSRPTEKAFTVPITDVTENALKDLDDVMKTTK

SEQ ID NO: 2694 - protein, 527 aa, synthetic construct
  REGION 1..527: note = LRRC4C (Q9HCJ2) SP+PP+ECD
MLNKMTLHPQQIMIGPRFNRALFDPLLVVLLALQLLVVAGLVRAQTCPSVCSCSNQFSKVICVRKNLREVPDGISTNTRLLNLHENQIQIIKVNSFKHLRHLEILQLSRNHIRTIEIGAFNGLANLNTLELFDNRLTTIPNGAFVYLSKLKELWLRNNPIESIPSYAFNRIPSLRRLDLGELKRLSYISEGAFEGLSNLRYLNLAMCNLREIPNLTPLIKLDELDLSGNHLSAIRPGSFQGLMHLQKLWMIQSQIQVIERNAFDNLQSLVEINLAHNNLTLLPHDLFTPLHHLERIHLHHNPWNCNCDILWLSWWIKDMAPSNTACCARCNTPPNLKGRYIGELDQNYFTCYAPVIVEPPADLNVTEGMAAELKCRASTSLTSVSWITPNGTVMTHGAYKVRIAVLSDGTLNFTNVTVQDTGMYTCMVSNSVGNTTASATLNVTAATTTPFSYFSTVTVETMEPSQDEARTTDNNVGPTPVVDWETTNVTTSLTPQSTRSTEKTFTIPVTDINSGIPGIDEVMKTTK

SEQ ID NO: 2695 - protein, 244 aa, synthetic construct
  REGION 1..244: note = LRRC52 (Q8N7C0) SP+PP+ECD
MSLASGPGPGWLLFSFGMGLVSGSKCPNNCLCQAQEVICTGKQLTEYPLDIPLNTRRLFLNENRITSLPAMHLGLLSDLVYLDCQNNRIREVMDYTFIGVFKLIYLDLSSNNLTSISPFTFSVLSNLVQLNIANNPHLLSLHKFTFANTTSLRYLDLRNTGLQTLDSAALYHLTTLETLFLSGNPWKCNCSFLDFAIFLIVFHMDPSDDLNATCVEPTELTGWPITRVGNPLRYMCITHLDHKD

SEQ ID NO: 2696 - protein, 631 aa, synthetic construct
  REGION 1..631: note = LRRN1 (Q6UXK5) SP+PP+ECD
MARMSFVIAACQLVLGLLMTSLTESSIQNSECPQLCVCEIRPWFTPQSTYREATTVDCNDLRLTRIPSNLSSDTQVLLLQSNNIAKTVDELQQLFNLTELDFSQNNFTNIKEVGLANLTQLTTLHLEENQITEMTDYCLQDLSNLQELYINHNQISTISAHAFAGLKNLLRLHLNSNKLKVIDSRWFDSTPNLEILMIGENPVIGILDMNFKPLANLRSLVLAGMYLTDIPGNALVGLDSLESLSFYDNKLVKVPQLALQKVPNLKFLDLNKNPIHKIQEGDFKNMLRLKELGINNMGELVSVDRYALDNLPELTKLEATNNPKLSYIHRLAFRSVPALESLMLNNNALNAIYQKTVESLPNLREISIHSNPLRCDCVIHWINSNKTNIRFMEPLSMFCAMPPEYKGHQVKEVLIQDSSEQCLPMISHDSFPNRLNVDIGTTVFLDCRAMAEPEPEIYWVTPIGNKITVETLSDKYKLSSEGTLEISNIQIEDSGRYTCVAQNVQGADTRVATIKVNGTLLDGTQVLKIYVKQTESHSILVSWKVNSNVMTSNLKWSSATMKIDNPHITYTARVPVDVHEYNLTHLQPSTDYEVCLTVSNIHQQTQKSCVNVTTKNAAFAVDISDQETSTA

SEQ ID NO: 2697 - protein, 630 aa, synthetic construct
  REGION 1..630: note = LRRN2 (O75325) SP+PP+ECD
MRLLVAPLLLAWVAGATAAVPVVPWHVPCPPQCACQIRPWYTPRSSYREATTVDCNDLFLTAVPPALPAGTQTLLLQSNSIVRVDQSELGYLANLTELDLSQNSFSDARDCDFHALPQLLSLHLEENQLTRLEDHSFAGLASLQELYLNHNQLYRIAPRAFSGLSNLLRLHLNSNLLRAIDSRWFEMLPNLEILMIGGNKVDAILDMNFRPLANLRSLVLAGMNLREISDYALEGLQSLESLSFYDNQLARVPRRALEQVPGLKFLDLNKNPLQRVGPGDFANMLHLKELGLNNMEELVSIDKFALVNLPELTKLDITNNPRLSFIHPRAFHHLPQMETLMLNNNALSALHQQTVESLPNLQEVGLHGNPIRCDCVIRWANATGTRVRFIEPQSTLCAEPPDLQRLPVREVPFREMTDHCLPLISPRSFPPSLQVASGESMVLHCRALAEPEPEIYWVTPAGLRLTPAHAGRRYRVYPEGTLELRRVTAEEAGLYTCVAQNLVGADTKTVSVVVGRALLQPGRDEGQGLELRVQETHPYHILLSWVTPPNTVSTNLTWSSASSLRGQGATALARLPRGTHSYNITRLLQATEYWACLQVAFADAHTQLACVWARTKEATSCHRALGDRPG

SEQ ID NO: 2698 - protein, 628 aa, synthetic construct
  REGION 1..628: note = LRRN3 (Q9H3W5) SP+PP+ECD
MKDMPLRIHVLLGLAITTLVQAVDKKVDCPRLCTCEIRPWFTPRSIYMEASTVDCNDLGLLTFPARLPANTQILLLQTNNIAKIEYSTDFPVNLTGLDLSQNNLSSVTNINVKKMPQLLSVYLEENKLTELPEKCLSELSNLQELYINHNLLSTISPGAFIGLHNLLRLHLNSNRLQMINSKWFDALPNLEILMIGENPIIRIKDMNFKPLINLRSLVIAGINLTEIPDNALVGLENLESISFYDNRLIKVPHVALQKVVNLKFLDLNKNPINRIRRGDFSNMLHLKELGINNMPELISIDSLAVDNLPDLRKIEATNNPRLSYIHPNAFFRLPKLESLMLNSNALSALYHGTIESLPNLKEISIHSNPIRCDCVIRWMNMNKTNIRFMEPDSLFCVDPPEFQGQNVRQVHFRDMMEICLPLIAPESFPSNLNVEAGSYVSFHCRATAEPQPEIYWITPSGQKLLPNTLTDKFYVHSEGTLDINGVTPKEGGLYTCIATNLVGADLKSVMIKVDGSFPQDNNGSLNIKIRDIQANSVLVSWKASSKILKSSVKWTAFVKTENSHAAQSARIPSDVKVYNLTHLNPSTEYKICIDIPTIYQKNRKKCVNVTTKGLHPDQKEYEKNNTTT

SEQ ID NO: 2699 - protein, 679 aa, synthetic construct
  REGION 1..679: note = LRRN4 (Q8WUT4) SP+PP+ECD
MRQTLPLLLLTVLRPSWADPPQEKVPLFRVTQQGPWGSSGSNATDSPCEGLPAADATALTLANRNLERLPGCLPRTLRSLDASHNLLRALSTSELGHLEQLQVLTLRHNRIAALRWGPGGPAGLHTLDLSYNQLAALPPCTGPALSSLRALALAGNPLRALQPRAFACFPALQLLNLSCTALGRGAQGGIAEAAFAGEDGAPLVTLEVLDLSGTFLERVESGWIRDLPKLTSLYLRKMPRLTTLEGDIFKMTPNLQQLDCQDSPALASVATHIFQDTPHLQVLLFQNCNLSSFPPWTLDSSQVLSINLFGNPLTCSCDLSWLLTDAKRTVLSRAADTMCAPAAGSSGPFSASLSLSQLPGVCQSDQSTTLGASHPPCFNRSTYAQGTTVAPSAAPATRPAGDQQSVSKAPNVGSRTIAAWPHSDAREGTAPSTTNSVAGHSNSSVFPRAASTTRTQHRGEHAPELVLEPDISAASTPLASKLLGPFPTSWDRSISSPQPGQRTHATPQAPNPSLSEGEIPVLLLDDYSEEEEGRKEEVGTPHQDVPCDYHPCKHLQTPCAELQRRWRCRCPGLSGEDTIPDPPRLQGVTETTDTSALVHWCAPNSVVHGYQIRYSAEGWAGNQSVVGVIYATARQHPLYGLSPGTTYRVCVLAANRAGLSQPRSSGWRSPCAAFTTKPS

SEQ ID NO: 2700 - protein, 194 aa, synthetic construct
  REGION 1..194: note = LRRN4CL (Q8ND94) SP+PP+ECD
MLGSPCLLWLLAVTFLVPRAQPLAPQDFEEEEADETETAWPPLPAVPCDYDHCRHLQVPCKELQRVGPAACLCPGLSSPAQPPDPPRMGEVRIAAEEGRAVVHWCAPFSPVLHYWLLLWDGSEAAQKGPPLNATVRRAELKGLKPGGIYVVCVVAANEAGASRVPQAGGEGLEGADIPAFGPCSRLAVPPNPRT

SEQ ID NO: 2701 - protein, 422 aa, synthetic construct
  REGION 1..422: note = LRRTM2 (O43300) SP+PP+ECD
MGLHFKWPLGAPMLAAIYAMSMVLKMLPALGMACPPKCRCEKLLFYCDSQGFHSVPNATDKGSLGLSLRHNHITELERDQFASFSQLTWLHLDHNQISTVKEDAFQGLYKLKELILSSNKIFYLPNTTFTQLINLQNLDLSFNQLSSLHPELFYGLRKLQTLHLRSNSLRTIPVRLFWDCRSLEFLDLSTNRLRSLARNGFAGLIKLRELHLEHNQLTKINFAHFLRLSSLHTLFLQWNKISNLTCGMEWTWGTLEKLDLTGNEIKAIDLTVFETMPNLKILLMDNNKLNSLDSKILNSLRSLTTVGLSGNLWECSARICALASWLGSFQGRWEHSILCHSPDHTQGEDILDAVHGFQLCWNLSTTVTVMATTYRDPTTEYTKRISSSSYHVGDKEIPTTAGIAVTTEEHFPEPDNAIFTQR

SEQ ID NO: 2702 - protein, 419 aa, synthetic construct
  REGION 1..419: note = LRRTM3 (Q86VH5) SP+PP+ECD
MGFNVIRLLSGSAVALVIAPTVLLTMLSSAERGCPKGCRCEGKMVYCESQKLQEIPSSISAGCLGLSLRYNSLQKLKYNQFKGLNQLTWLYLDHNHISNIDENAFNGIRRLKELILSSNRISYFLNNTFRPVTNLRNLDLSYNQLHSLGSEQFRGLRKLLSLHLRSNSLRTIPVRIFQDCRNLELLDLGYNRIRSLARNVFAGMIRLKELHLEHNQFSKLNLALFPRLVSLQNLYLQWNKISVIGQTMSWTWSSLQRLDLSGNEIEAFSGPSVFQCVPNLQRLNLDSNKLTFIGQEILDSWISLNDISLAGNIWECSRNICSLVNWLKSFKGLRENTIICASPKELQGVNVIDAVKNYSICGKSTTERFDLARALPKPTFKPKLPRPKHESKPPLPPTVGATEPGPETDADAEHISFHK

SEQ ID NO: 2703 - protein, 424 aa, synthetic construct
  REGION 1..424: note = LRRTM4 (Q86VH4) SP+PP+ECD
MGFHLITQLKGMSVVLVLLPTLLLVMLTGAQRACPKNCRCDGKIVYCESHAFADIPENISGGSQGLSLRFNSIQKLKSNQFAGLNQLIWLYLDHNYISSVDEDAFQGIRRLKELILSSNKITYLHNKTFHPVPNLRNLDLSYNKLQTLQSEQFKGLRKLIILHLRSNSLKTVPIRVFQDCRNLDFLDLGYNRLRSLSRNAFAGLLKLKELHLEHNQFSKINFAHFPRLFNLRSIYLQWNRIRSISQGLTWTWSSLHNLDLSGNDIQGIEPGTFKCLPNLQKLNLDSNKLTNISQETVNAWISLISITLSGNMWECSRSICPLFYWLKNFKGNKESTMICAGPKHIQGEKVSDAVETYNICSEVQVVNTERSHLVPQTPQKPLIIPRPTIFKPDVTQSTFETPSPSPGFQIPGAEQEYEHVSFHK

SEQ ID NO: 2704 - protein, 288 aa, synthetic construct
  REGION 1..288: note = LRTM1 (Q9HBL6) SP+PP+ECD
MKGELLLFSSVIVLLQVVCSCPDKCYCQSSTNFVDCSQQGLAEIPSHLPPQTRTLHLQDNQIHHLPAFAFRSVPWLMTLNLSNNSLSNLAPGAFHGLQHLQVLNLTQNSLLSLESRLFHSLPQLRELDLSSNNISHLPTSLGETWENLTILAVQQNQLQQLDRALLESMPSVRLLLLKDNLWKCNCHLLGLKLWLEKFVYKGGLTDGIICESPDTWKGKDLLRIPHELYQPCPLPAPDPVSSQAQWPGSAHGVVLRPPENHNAGERELLECELKPKPRPANLRHAIAT

SEQ ID NO: 2705 - protein, 310 aa, synthetic construct
  REGION 1..310: note = LRTM2 (Q8N967) SP+PP+ECD
MLAPGSSPGQRGRLALQWRQVSWITCWIALYAVEALPTCPFSCKCDSRSLEVDCSGLGLTTVPPDVPAATRTLLLLNNKLSALPSWAFANLSSLQRLDLSNNFLDRLPRSIFGDLTNLTELQLRNNSIRTLDRDLLRHSPLLRHLDLSINGLAQLPPGLFDGLLALRSLSLRSNRLQNLDRLTFEPLANLQLLQVGDNPWECDCNLREFKHWMEWFSYRGGRLDQLACTLPKELRGKDMRMVPMEMFNYCSQLEDENSSAGLDIPGPPCTKASPEPAKPKPGAEPEPEPSTACPQKQRHRPASVRRAMGT

SEQ ID NO: 2706 - protein, 227 aa, synthetic construct
  REGION 1..227: note = LTBR (P36941) SP+PP+ECD
MLLPWATSAPGLAWGPLVLGLFGLLAASQPQAVPPYASENQTCRDQEKEYYEPQHRICCSRCPPGTYVSAKCSRIRDTVCATCAENSYNEHWNYLTICQLCRPCDPVMGLEEIAPCTSKRKTQCRCQPGMFCAAWALECTHCELLSDCPPGTEAELKDEVGKGNNHCVPCKAGHFQNTSSPSARCQPHTRCENQGLVEAAPGTAQSDTTCKNPLEPLPPEMSGTMLM

SEQ ID NO: 2707 - protein, 424 aa, synthetic construct
  REGION 1..424: note = LTK (P29376) SP+PP+ECD
MGCWGQLLVWFGAAGAILCSSPGSQETFLRSSPLPLASPSPRDPKVSAPPSILEPASPLNSPGTEGSWLFSTCGASGRHGPTQTQCDGAYAGTSVVVTVGAAGQLRGVQLWRVPGPGQYLISAYGAAGGKGAKNHLSRAHGVFVSAIFSLGLGESLYILVGQQGEDACPGGSPESQLVCLGESRAVEEHAAMDGSEGVPGSRRWAGGGGGGGGATYVFRVRAGELEPLLVAAGGGGRAYLRPRDRGRTQASPEKLENRSEAPGSGGRGGAAGGGGGWTSRAPSPQAGRSLQEGAEGGQGCSEAWATLGWAAAGGFGGGGGACTAGGGGGGYRGGDASETDNLWADGEDGVSFIHPSSELFLQPLAVTENHGEVEIRRHLNCSHCPLRDCQWQAELQLAECLCPEGMELAVDNVTCMDLHKPPGP

SEQ ID NO: 2708 - protein, 235 aa, synthetic construct
  REGION 1..235: note = LY6G6F (Q5SQ64) SP+PP+ECD
MAVLFLLLFLCGTPQAADNMQAIYVALGEAVELPCPSPPTLHGDEHLSWFCSPAAGSFTTLVAQVQVGRPAPDPGKPGRESRLRLLGNYSLWLEGSKEEDAGRYWCAVLGQHHNYQNWRVYDVLVLKGSQLSARAADGSPCNVLLCSVVPSRRMDSVTWQEGKGPVRGRVQSFWGSEAALLLVCPGEGLSEPRSRRPRIIRCLMTHNKGVSFSLAASIDASPALCAPSTGWDMPW

SEQ ID NO: 2709 - protein, 1666 aa, synthetic construct
  REGION 1..1666: note = LY75 (O60449) SP+PP+ECD
MRTGWATPRRPAGLLMLLFWFFDLAEPSGRAANDPFTIVHGNTGKCIKPVYGWIVADDCDETEDKLWKWVSQHRLFHLHSQKCLGLDITKSVNELRMFSCDSSAMLWWKCEHHSLYGAARYRLALKDGHGTAISNASDVWKKGGSEESLCDQPYHEIYTRDGNSYGRPCEFPFLIDGTWHHDCILDEDHSGPWCATTLNYEYDRKWGICLKPENGCEDNWEKNEQFGSCYQFNTQTALSWKEAYVSCQNQGADLLSINSAAELTYLKEKEGIAKIFWIGLNQLYSARGWEWSDHKPLNFLNWDPDRPSAPTIGGSSCARMDAESGLWQSFSCEAQLPYVCRKPLNNTVELTDVWTYSDTRCDAGWLPNNGFCYLLVNESNSWDKAHAKCKAFSSDLISIHSLADVEVVVTKLHNEDIKEEVWIGLKNINIPTLFQWSDGTEVTLTYWDENEPNVPYNKTPNCVSYLGELGQWKVQSCEEKLKYVCKRKGEKLNDASSDKMCPPDEGWKRHGETCYKIYEDEVPFGTNCNLTITSRFEQEYLNDLMKKYDKSLRKYFWTGLRDVDSCGEYNWATVGGRRRAVTFSNWNFLEPASPGGCVAMSTGKSVGKWEVKDCRSFKALSICKKMSGPLGPEEASPKPDDPCPEGWQSFPASLSCYKVFHAERIVRKRNWEEAERFCQALGAHLSSFSHVDEIKEFLHFLTDQFSGQHWLWIGLNKRSPDLQGSWQWSDRTPVSTIIMPNEFQQDYDIRDCAAVKVFHRPWRRGWHFYDDREFIYLRPFACDTKLEWVCQIPKGRTPKTPDWYNPDRAGIHGPPLIIEGSEYWFVADLHLNYEEAVLYCASNHSFLATITSFVGLKAIKNKIANISGDGQKWWIRISEWPIDDHFTYSRYPWHRFPVTFGEECLYMSAKTWLIDLGKPTDCSTKLPFICEKYNVSSLEKYSPDSAAKVQCSEQWIPFQNKCFLKIKPVSLTFSQASDTCHSYGGTLPSVLSQIEQDFITSLLPDMEATLWIGLRWTAYEKINKWTDNRELTYSNFHPLLVSGRLRIPENFFEEESRYHCALILNLQKSPFTGTWNFTSCSERHFVSLCQKYSEVKSRQTLQNASETVKYLNNLYKIIPKTLTWHSAKRECLKSNMQLVSITDPYQQAFLSVQALLHNSSLWIGLFSQDDELNFGWSDGKRLHFSRWAETNGQLEDCVVLDTDGFWKTVDCNDNQPGAICYYSGNETEKEVKPVDSVKCPSPVLNTPWIPFQNCCYNFIITKNRHMATTQDEVHTKCQKLNPKSHILSIRDEKENNFVLEQLLYFNYMASWVMLGITYRNKSLMWFDKTPLSYTHWRAGRPTIKNEKFLAGLSTDGFWDIQTFKVIEEAVYFHQHSILACKIEMVDYKEEYNTTLPQFMPYEDGIYSVIQKKVTWYEALNMCSQSGGHLASVHNQNGQLFLEDIVKRDGFPLWVGLSSHDGSESSFEWSDGSTFDYIPWKGQTSPGNCVLLDPKGTWKHEKCNSVKDGAICYKPTKSKKLSRLTYSSRCPAAKENGSRWIQYKGHCYKSDQALHSFSEAKKLCSKHDHSATIVSIKDEDENKFVSRLMRENNNITMRVWLGLSQHSVDQSWSWLDGSEVTFVKWENKSKSGVGRCSMLIASNETWKKVECEHGFGRVVCKVPLGPD

SEQ ID NO: 2710 - protein, 454 aa, synthetic construct
  REGION 1..454: note = LY9 (Q9HBG7) SP+PP+ECD
MVAPKSHTDDWAPGPFSSKPQRSQLQIFSSVLQTSLLFLLMGLRASGKDSAPTVVSGILGGSVTLPLNISVDTEIENVIWIGPKNALAFARPKENVTIMVKSYLGRLDITKWSYSLCISNLTLNDAGSYKAQINQRNFEVTTEEEFTLFVYEQLQEPQVTMKSVKVSENFSCNITLMCSVKGAEKSVLYSWTPREPHASESNGGSILTVSRTPCDPDLPYICTAQNPVSQRSSLPVHVGQFCTDPGASRGGTTGETVVGVLGEPVTLPLALPACRDTEKVVWLFNTSIISKEREEAATADPLIKSRDPYKNRVWVSSQDCSLKISQLKIEDAGPYHAYVCSEASSVTSMTHVTLLIYRRLRKPKITWSLRHSEDGICRISLTCSVEDGGNTVMYTWTPLQKEAVVSQGESHLNVSWRSSENHPNLTCTASNPVSRSSHQFLSENICSGPERNTK

SEQ ID NO: 2711 - protein, 238 aa, synthetic construct
  REGION 1..238: note = LYVE1 (Q9Y5Y7) SP+PP+ECD
MARCFSLVLLLTSIWTTRLLVQGSLRAEELSIQVSCRIMGITLVSKKANQQLNFTEAKEACRLLGLSLAGKDQVETALKASFETCSYGWVGDGFVVISRISPNPKCGKNGVGVLIWKVPVSRQFAAYCYNSSDTWTNSCIPEIITTKDPIFNTQTATQTTEFIVSDSTYSVASPYSTIPAPTTTPPAPASTSIPRRKKLICVTEVFMETSTMSTETEPFVENKAAFKNEAAGFGGVPT

SEQ ID NO: 2712 - protein, 185 aa, synthetic construct
  REGION 1..185: note = M6PR (P20645) SP+PP+ECD
MFPFYSCWRTGLLLLLLAVAVRESWQTEEKTCDLVGEKGKESEKELALVKRLKPLFNKSFESTVGQGSDTYIYIFRVCREAGNHTSGAGLVQINKSNGKETVVGRLNETHIFNGSNWIMLIYKGGDEYDNHCGKEQRRAVVMISCNRHTLADNFNPVSEERGKVQDCFYLFEMDSSLACSPEISH

SEQ ID NO: 2713 - protein, 516 aa, synthetic construct
  REGION 1..516: note = MAG (P20916) SP+PP+ECD
MIFLTALPLFWIMISASRGGHWGAWMPSSISAFEGTCVSIPCRFDFPDELRPAVVHGVWYFNSPYPKNYPPVVFKSRTQVVHESFQGRSRLLGDLGLRNCTLLLSNVSPELGGKYYFRGDLGGYNQYTFSEHSVLDIVNTPNIVVPPEVVAGTEVEVSCMVPDNCPELRPELSWLGHEGLGEPAVLGRLREDEGTWVQVSLLHFVPTREANGHRLGCQASFPNTTLQFEGYASMDVKYPPVIVEMNSSVEAIEGSHVSLLCGADSNPPPLLTWMRDGTVLREAVAESLLLELEEVTPAEDGVYACLAENAYGQDNRTVGLSVMYAPWKPTVNGTMVAVEGETVSILCSTQSNPDPILTIFKEKQILSTVIYESELQLELPAVSPEDDGEYWCVAENQYGQRATAFNLSVEFAPVLLLESHCAAARDTVQCLCVVKSNPEPSVAFELPSRNVTVNESEREFVYSERSGLVLTSILTLRGQAQAPPRVICTARNLYGAKSLELPFQGAHRLMWAKIGP

SEQ ID NO: 2714 - protein, 1151 aa, synthetic construct
  REGION 1..1151: note = MAMDC4 (Q6UXC1) SP+PP+ECD
MPLSSHLLPALVLFLAGSSGWAWVPNHCRSPGQAVCNFVCDCRDCSDEAQCGYHGASPTLGAPFACDFEQDPCGWRDISTSGYSWLRDRAGAALEGPGPHSDHTLGTDLGWYMAVGTHRGKEASTAALRSPTLREAASSCKLRLWYHAASGDVAELRVELTHGAETLTLWQSTGPWGPGWQELAVTTGRIRGDFRVTFSATRNATHRGAVALDDLEFWDCGLPTPQANCPPGHHHCQNKVCVEPQQLCDGEDNCGDLSDENPLTCGRHIATDFETGLGPWNRSEGWSRNHRAGGPERPSWPRRDHSRNSAQGSFLVSVAEPGTPAILSSPEFQASGTSNCSLVFYQYLSGSEAGCLQLFLQTLGPGAPRAPVLLRRRRGELGTAWVRDRVDIQSAYPFQILLAGQTGPGGVVGLDDLILSDHCRPVSEVSTLQPLPPGPRAPAPQPLPPSSRLQDSCKQGHLACGDLCVPPEQLCDFEEQCAGGEDEQACGTTDFESPEAGGWEDASVGRLQWRRVSAQESQGSSAAAAGHFLSLQRAWGQLGAEARVLTPLLGPSGPSCELHLAYYLQSQPRGFLALVVVDNGSRELAWQALSSSAGIWKVDKVLLGARRRPFRLEFVGLVDLDGPDQQGAGVDNVTLRDCSPTVTTERDREVSCNFERDTCSWYPGHLSDTHWRWVESRGPDHDHTTGQGHFVLLDPTDPLAWGHSAHLLSRPQVPAAPTECLSFWYHLHGPQIGTLRLAMRREGEETHLWSRSGTQGNRWHEAWATLSHQPGSHAQYQLLFEGLRDGYHGTMALDDVAVRPGPCWAPNYCSFEDSDCGFSPGGQGLWRRQANASGHAAWGPPTDHTTETAQGHYMVVDTSPDALPRGQTASLTSKEHRPLAQPACLTFWYHGSLRSPGTLRVYLEERGRHQVLSLSAHGGLAWRLGSMDVQAERAWRVVFEAVAAGVAHSYVALDDLLLQDGPCPQPGSCDFESGLCGWSHLAWPGLGGYSWDWGGGATPSRYPQPPVDHTLGTEAGHFAFFETGVLGPGGRAAWLRSEPLPATPASCLRFWYHMGFPEHFYKGELKVLLHSAQGQLAVWGAGGHRRHQWLEAQVEVASAKEFQIVFEATLGGQPALGPIALDDVEYLAGQHCQQPAPSPGNTAAPGS

SEQ ID NO: 2715 - protein, 385 aa, synthetic construct
  REGION 1..385: note = MANSC1 (Q9H8J5) SP+PP+ECD
MFFGGEGSLTYTLVIICFLTLRLSASQNCLKKSLEDVVIDIQSSLSKGIRGNEPVYTSTQEDCINSCCSTKNISGDKACNLMIFDTRKTARQPNCYLFFCPNEEACPLKPAKGLMSYRIITDFPSLTRNLPSQELPQEDSLLHGQFSQAVTPLAHHHTDYSKPTDISWRDTLSQKFGSSDHLEKLFKMDEASAQLLAYKEKGHSQSSQFSSDQEIAHLLPENVSALPATVAVASPHTTSATPKPATLLPTNASVTPSGTSQPQLATTAPPVTTVTSQPPTTLISTVFTRAAATLQAMATTAVLTTTFQAPTDSKGSLETIPFTEISNLTLNTGNVYNPTALSMSNVESSTMNKTASWEGREASPGSSSQGSVPENQYGLPFEKWL

SEQ ID NO: 2716 - protein, 284 aa, synthetic construct
  REGION 1..284: note = MANSC4 (A6NHS7) SP+PP+ECD
MHVAEVAVNVILLLSMGWTSDSLCSPTIFYRDCWIRRFPGLLINLEESQKLGAQFLKYYSESTGQKCSRSCCLRKDVSCNLAVFYHSPIHDNINCLHVHCPTLESCILEPGTSAILYNITDGIDPDLLVFEQSPTYLNTRSSSNRWDRLRILKAMNLDKQTTTINGMLPSTEAPSSTTHQDLVVNTNSTSYSKELTTDFWARFTSLNESITTKINKVSPSTDFISNPDNKTISPFFEPIDTKLSHMPVPPGLNSSKQLLNKTKGYNSRNHTSANEDEVSVTSKT

SEQ ID NO: 2717 - protein, 559 aa, synthetic construct
  REGION 1..559: note = MCAM (P43121) SP+PP+ECD
MGLPRLVCAFLLAACCCCPRVAGVPGEAEQPAPELVEVEVGSTALLKCGLSQSQGNLSHVDWFSVHKEKRTLIFRVRQGQGQSEPGEYEQRLSLQDRGATLALTQVTPQDERIFLCQGKRPRSQEYRIQLRVYKAPEEPNIQVNPLGIPVNSKEPEEVATCVGRNGYPIPQVIWYKNGRPLKEEKNRVHIQSSQTVESSGLYTLQSILKAQLVKEDKDAQFYCELNYRLPSGNHMKESREVTVPVFYPTEKVWLEVEPVGMLKEGDRVEIRCLADGNPPPHFSISKQNPSTREAEEETTNDNGVLVLEPARKEHSGRYECQGLDLDTMISLLSEPQELLVNYVSDVRVSPAAPERQEGSSLTLTCEAESSQDLEFQWLREETGQVLERGPVLQLHDLKREAGGGYRCVASVPSIPGLNRTQLVNVAIFGPPWMAFKERKVWVKENMVLNLSCEASGHPRPTISWNVNGTASEQDQDPQRVLSTLNVLVTPELLETGVECTASNDLGKNTSILFLELVNLTTLTPDSNTTTGLSTSTASPHTRANSTSTERKLPEPESRG

SEQ ID NO: 2718 - protein, 857 aa, synthetic construct
  REGION 1..857: note = MEGF10 (Q96KG7) SP+PP+ECD
MVISLNSCLSFICLLLCHWIGTASPLNLEDPNVCSHWESYSVTVQESYPHPFDQIYYTSCTDILNWFKCTRHRVSYRTAYRHGEKTMYRRKSQCCPGFYESGEMCVPHCADKCVHGRCIAPNTCQCEPGWGGTNCSSACDGDHWGPHCTSRCQCKNGALCNPITGACHCAAGFRGWRCEDRCEQGTYGNDCHQRCQCQNGATCDHVTGECRCPPGYTGAFCEDLCPPGKHGPQCEQRCPCQNGGVCHHVTGECSCPSGWMGTVCGQPCPEGRFGKNCSQECQCHNGGTCDAATGQCHCSPGYTGERCQDECPVGTYGVLCAETCQCVNGGKCYHVSGACLCEAGFAGERCEARLCPEGLYGIKCDKRCPCHLENTHSCHPMSGECACKPGWSGLYCNETCSPGFYGEACQQICSCQNGADCDSVTGKCTCAPGFKGIDCSTPCPLGTYGINCSSRCGCKNDAVCSPVDGSCTCKAGWHGVDCSIRCPSGTWGFGCNLTCQCLNGGACNTLDGTCTCAPGWRGEKCELPCQDGTYGLNCAERCDCSHADGCHPTTGHCRCLPGWSGVHCDSVCAEGRWGPNCSLPCYCKNGASCSPDDGICECAPGFRGTTCQRICSPGFYGHRCSQTCPQCVHSSGPCHHITGLCDCLPGFTGALCNEVCPSGRFGKNCAGICTCTNNGTCNPIDRSCQCYPGWIGSDCSQPCPPAHWGPNCIHTCNCHNGAFCSAYDGECKCTPGWTGLYCTQRCPLGFYGKDCALICQCQNGADCDHISGQCTCRTGFMGRHCEQKCPSGTYGYGCRQICDCLNNSTCDHITGTCYCSPGWKGARCDQAGVIIVGNLNSLSRTSTALPADSYQIG

SEQ ID NO: 2719 - protein, 848 aa, synthetic construct
  REGION 1..848: note = MEGF11 (A6BM72) SP+PP+ECD
MVLSLTGLIAFSFLQATLALNPEDPNVCSHWESYAVTVQESYAHPFDQIYYTRCTDILNWFKCTRHRISYKTAYRRGLRTMYRRRSQCCPGYYESGDFCIPLCTEECVHGRCVSPDTCHCEPGWGGPDCSSGCDSDHWGPHCSNRCQCQNGALCNPITGACVCAAGFRGWRCEELCAPGTHGKGCQLPCQCRHGASCDPRAGECLCAPGYTGVYCEELCPPGSHGAHCELRCPCQNGGTCHHITGECACPPGWTGAVCAQPCPPGTFGQNCSQDCPCHHGGQCDHVTGQCHCTAGYMGDRCQEECPFGSFGFQCSQHCDCHNGGQCSPTTGACECEPGYKGPRCQERLCPEGLHGPGCTLPCPCDADNTISCHPVTGACTCQPGWSGHHCNESCPVGYYGDGCQLPCTCQNGADCHSITGGCTCAPGFMGEVCAVSCAAGTYGPNCSSICSCNNGGTCSPVDGSCTCKEGWQGLDCTLPCPSGTWGLNCNESCTCANGAACSPIDGSCSCTPGWLGDTCELPCPDGTFGLNCSEHCDCSHADGCDPVTGHCCCLAGWTGIRCDSTCPPGRWGPNCSVSCSCENGGSCSPEDGSCECAPGFRGPLCQRICPPGFYGHGCAQPCPLCVHSSRPCHHISGICECLPGFSGALCNQVCAGGYFGQDCAQLCSCANNGTCSPIDGSCQCFPGWIGKDCSQACPPGFWGPACFHACSCHNGASCSAEDGACHCTPGWTGLFCTQRCPAAFFGKDCGRVCQCQNGASCDHISGKCTCRTGFTGQHCEQRCAPGTFGYGCQQLCECMNNSTCDHVTGTCYCSPGFKGIRCDQAALMMEELNPYTKISPALGAERHS

SEQ ID NO: 2720 - protein, 2845 aa, synthetic construct
  REGION 1..2845: note = MEGF8 (Q7Z7M0) SP+PP+ECD
MALGKVLAMALVLALAVLGSLSPGARAGDCKGQRQVLREAPGFVTDGAGNYSVNGNCEWLIEAPSPQHRILLDFLFLDTECTYDYLFVYDGDSPRGPLLASLSGSTRPPPIEASSGKMLLHLFSDANYNLLGFNASFRFSLCPGGCQSHGQCQPPGVCACEPGWGGPDCGLQECSAYCGSHGTCASPLGPCRCEPGFLGRACDLHLWENQGAGWWHNVSARDPAFSARIGAAGAFLSPPGLLAVFGGQDLNNALGDLVLYNFSANTWESWDLSPAPAARHSHVAVAWAGSLVLMGGELADGSLTNDVWAFSPLGRGHWELLAPPASSSSGPPGLAGHAAALVDDVWLYVSGGRTPHDLFSSGLFRFRLDSTSGGYWEQVIPAGGRPPAATGHSMVFHAPSRALLVHGGHRPSTARFSVRVNSTELFHVDRHVWTTLKGRDGLQGPRERAFHTASVLGNYMVVYGGNVHTHYQEEKCYEDGIFFYHLGCHQWVSGAELAPPGTPEGRAAPPSGRYSHVAAVLGGSVLLVAGGYSGRPRGDLMAYKVPPFVFQAPAPDYHLDYCSMYTDHSVCSRDPECSWCQGACQAAPPPGTPLGACPAASCLGLGRLLGDCQACLAFSSPTAPPRGPGTLGWCVHNESCLPRPEQARCRGEQISGTVGWWGPAPVFVTSLEACVTQSFLPGLHLLTFQQPPNTSQPDKVSIVRSTTITLTPSAETDVSLVYRGFIYPMLPGGPGGPGAEDVAVWTRAQRLHVLARMARGPDTENMEEVGRWVAHQEKETRRLQRPGSARLFPLPGRDHKYAVEIQGQLNGSAGPGHSELTLLWDRTGVPGGSEISFFFLEPYRSSSCTSYSSCLGCLADQGCGWCLTSATCHLRQGGAHCGDDGAGGSLLVLVPTLCPLCEEHRDCHACTQDPFCEWHQSTSRKGDAACSRRGRGRGALKSPEECPPLCSQRLTCEDCLANSSQCAWCQSTHTCFLFAAYLARYPHGGCRGWDDSVHSEPRCRSCDGFLTCHECLQSHECGWCGNEDNPTLGRCLQGDFSGPLGGGNCSLWVGEGLGLPVALPARWAYARCPDVDECRLGLARCHPRATCLNTPLSYECHCQRGYQGDGISHCNRTCLEDCGHGVCSGPPDFTCVCDLGWTSDLPPPTPAPGPPAPRCSRDCGCSFHSHCRKRGPGFCDECQDWTWGEHCERCRPGSFGNATGSRGCRPCQCNGHGDPRRGHCDNLSGLCFCQDHTEGAHCQLCSPGYYGDPRAGGSCFRECGGRALLTNVSSVALGSRRVGGLLPPGGGAARAGPGLSYCVWVVSATEELQPCAPGTLCPPLTLTFSPDSSTPCTLSYVLAFDGFPRFLDTGVVQSDRSLIAAFCGQRRDRPLTVQALSGLLVLHWEANGSSSWGFNASVGSARCGSGGPGSCPVPQECVPQDGAAGAGLCRCPQGWAGPHCRMALCPENCNAHTGAGTCNQSLGVCICAEGFGGPDCATKLDGGQLVWETLMDSRLSADTASRFLHRLGHTMVDGPDATLWMFGGLGLPQGLLGNLYRYSVSERRWTQMLAGAEDGGPGPSPRSFHAAAYVPAGRGAMYLLGGLTAGGVTRDFWVLNLTTLQWRQEKAPQTVELPAVAGHTLTARRGLSLLLVGGYSPENGFNQQLLEYQLATGTWVSGAQSGTPPTGLYGHSAVYHEATDSLYVFGGFRFHVELAAPSPELYSLHCPDRTWSLLAPSQGAKRDRMRNVRGSSRGLGQVPGEQPGSWGFREVRKKMALWAALAGTGGFLEEISPHLKEPRPRLFHASALLGDTMVVLGGRSDPDEFSSDVLLYQVNCNAWLLPDLTRSASVGPPMEESVAHAVAAVGSRLYISGGFGGVALGRLLALTLPPDPCRLLSSPEACNQSGACTWCHGACLSGDQAHRLGCGGSPCSPMPRSPEECRRLRTCSECLARHPRTLQPGDGEASTPRCKWCTNCPEGACIGRNGSCTSENDCRINQREVFWAGNCSEAACGAADCEQCTREGKCMWTRQFKRTGETRRILSVQPTYDWTCFSHSLLNVSPMPVESSPPLPCPTPCHLLPNCTSCLDSKGADGGWQHCVWSSSLQQCLSPSYLPLRCMAGGCGRLLRGPESCSLGCAQATQCALCLRRPHCGWCAWGGQDGGGRCMEGGLSGPRDGLTCGRPGASWAFLSCPPEDECANGHHDCNETQNCHDQPHGYECSCKTGYTMDNMTGLCRPVCAQGCVNGSCVEPDHCRCHFGFVGRNCSTECRCNRHSECAGVGARDHCLLCRNHTKGSHCEQCLPLFVGSAVGGGTCRPCHAFCRGNSHICISRKELQMSKGEPKKYSLDPEEIENWVTEGPSEDEAVCVNCQNNSYGEKCESCLQGYFLLDGKCTKCQCNGHADTCNEQDGTGCPCQNNTETGTCQGSSPSDRRDCYKYQCAKCRESFHGSPLGGQQCYRLISVEQECCLDPTSQTNCFHEPKRRALGPGRTVLFGVQPKFTNVDIRLTLDVTFGAVDLYVSTSYDTFVVRVAPDTGVHTVHIQPPPAPPPPPPPADGGPRGAGDPGGAGASSGPGAPAEPRVREVWPRGLITYVTVTEPSAVLVVRGVRDRLVITYPHEHHALKSSRFYLLLLGVGDPSGPGANGSADSQGLLFFRQDQAHIDLFVFFSVFFSCFFLFLSLCVLLWKAKQALDQRQEQRRHLQEMTKMASRPFAKVTVCFPPDPTAPASAWKPAGLPPPAFRRSEPFLAPLLLTGAGGPWGPMGGGCCPPAIPATTAGLRAGPITLEPTEDGMAGVATLLLQLPGGPHAPNGACLGSALVTLRHRLHEYCGGGGGAGGSGHGTGAGRKGLLSQDNLTSMSL

SEQ ID NO: 2721 - protein, 514 aa, synthetic construct
  REGION 1..514: note = MEGF9 (Q9H1U4) SP+PP+ECD
MNGGAERAMRSLPSLGGLALLCCAAAAAAAAVASAASAGNVTGGGGAAGQVDASPGPGLRGEPSHPFPRATAPTAQAPRTGPPRATVHRPLAATSPAQSPETTPLWATAGPSSTTFQAPLGPSPTTPPAAERTSTTSQAPTRPAPTTLSTTTGPAPTTPVATTVPAPTTPRTPTPDLPSSSNSSVLPTPPATEAPSSPPPEYVCNCSVVGSLNVNRCNQTTGQCECRPGYQGLHCETCKEGFYLNYTSGLCQPCDCSPHGALSIPCNSSGKCQCKVGVIGSICDRCQDGYYGFSKNGCLPCQCNNRSASCDALTGACLNCQENSKGNHCEECKEGFYQSPDATKECLRCPCSAVTSTGSCSIKSSELEPECDQCKDGYIGPNCNKCENGYYNFDSICRKCQCHGHVDPVKTPKICKPESGECINCLHNTTGFWCENCLEGYVHDLEGNCIKKEVILPTPEGSTILVSNASLTTSVPTPVINSTFTPTTLQTIFSVSTSENSTSALADVSWTQFN

SEQ ID NO: 2722 - protein, 712 aa, synthetic construct
  REGION 1..712: note = MEP1A (Q16819) SP+PP+ECD
MAWIRSTCILFFTLLFAHIAAVPIKYLPEENVHDADFGEQKDISEINLAAGLDLFQGDILLQKSRNGLRDPNTRWTFPIPYILADNLGLNAKGAILYAFEMFRLKSCVDFKPYEGESSYIIFQQFDGCWSEVGDQHVGQNISIGQGCAYKAIIEHEILHALGFYHEQSRTDRDDYVNIWWDQILSGYQHNFDTYDDSLITDLNTPYDYESLMHYQPFSFNKNASVPTITAKIPEFNSIIGQRLDFSAIDLERLNRMYNCTTTHTLLDHCTFEKANICGMIQGTRDDTDWAHQDSAQAGEVDHTLLGQCTGAGYFMQFSTSSGSAEEAALLESRILYPKRKQQCLQFFYKMTGSPSDRLVVWVRRDDSTGNVRKLVKVQTFQGDDDHNWKIAHVVLKEEQKFRYLFQGTKGDPQNSTGGIYLDDITLTETPCPTGVWTVRNFSQVLENTSKGDKLQSPRFYNSEGYGFGVTLYPNSRESSGYLRLAFHVCSGENDAILEWPVENRQVIITILDQEPDVRNRMSSSMVFTTSKSHTSPAINDTVIWDRPSRVGTYHTDCNCFRSIDLGWSGFISHQMLKRRSFLKNDDLIIFVDFEDITHLSQTEVPTKGKRLSPQGLILQGQEQQVSEEGSGKAMLEEALPVSLSQGQPSRQKRSVENTGPLEDHNWPQYFRDPCDPNPCQNDGICVNVKGMASCRCISGHAFFYTGERCQAV

SEQ ID NO: 2723 - protein, 691 aa, synthetic construct
  REGION 1..691: note = MEP1B (Q16820) SP+PP+ECD
MDLWNLSWFLFLDALLVISGLATPENFDVDGGMDQDIFDINEGLGLDLFEGDIRLDRAQIRTPENFDVDGGMDQDIFDINEGLGLDLFEGDIRLDRAQIRNSIIGEKYRWPHTIPYVLEDSLEMNAKGVILNAFERYRLKTCIDFKPWAGETNYISVFKGSGCWSSVGNRRVGKQELSIGANCDRIATVQHEFLHALGFWHEQSRSDRDDYVRIMWDRILSGREHNFNTYSDDISDSLNVPYDYTSVMHYSKTAFQNGTEPTIVTRISDFEDVIGQRMDFSDSDLLKLNQLYNCSSSLSFMDSCSFELENVCGMIQSSGDNADWQRVSQVPRGPESDHSNMGQCQGSGFFMHFDSSSVNVGATAVLESRTLYPKRGFQCLQFYLYNSGSESDQLNIYIREYSADNVDGNLTLVEEIKEIPTGSWQLYHVTLKVTKKFRVVFEGRKGSGASLGGLSIDDINLSETRCPHHIWHIRNFTQFIGSPNGTLYSPPFYSSKGYAFQIYLNLAHVTNAGIYFHLISGANDDQLQWPCPWQQATMTLLDQNPDIRQRMSNQRSITTDPFMTTDNGNYFWDRPSKVGTVALFSNGTQFRRGGGYGTSAFITHERLKSRDFIKGDDVYILLTVEDISHLNSTQIQLTPAPSVQDLCSKTTCKNDGVCTVRDGKAECRCQSGEDWWYMGERCEKRGSTRDT

SEQ ID NO: 2724 - protein, 505 aa, synthetic construct
  REGION 1..505: note = MERTK (Q12866) SP+PP+ECD
MGPAPLPLLLGLFLPALWRRAITEAREEAKPYPLFPGPFPGSLQTDHTPLLSLPHASGYQPALMFSPTQPGRPHTGNVAIPQVTSVESKPLPPLAFKHTVGHIILSEHKGVKFNCSISVPNIYQDTTISWWKDGKELLGAHHAITQFYPDDEVTAIIASFSITSVQRSDNGSYICKMKINNEEIVSDPIYIEVQGLPHFTKQPESMNVTRNTAFNLTCQAVGPPEPVNIFWVQNSSRVNEQPEKSPSVLTVPGLTEMAVFSCEAHNDKGLTVSKGVQINIKAIPSPPTEVSIRNSTAHSILISWVPGFDGYSPFRNCSIQVKEADPLSNGSVMIFNTSALPHLYQIKQLQALANYSIGVSCMNEIGWSAVSPWILASTTEGAPSVAPLNVTVFLNESSDNVDIRWMKPPTKQQDGELVGYRISHVWQSAGISKELLEEVGQNGSRARISVQVHNATCTVRIAAVTRGGVGPFSDPVKIFIPAHGWVDYAPSSTPAPGNADPVLII

SEQ ID NO: 2725 - protein, 932 aa, synthetic construct
  REGION 1..932: note = MET (P08581) SP+PP+ECD
MKAPAVLAPGILVLLFTLVQRSNGECKEALAKSEMNVNMKYQLPNFTAETPIQNVILHEHHIFLGATNYIYVLNEEDLQKVAEYKTGPVLEHPDCFPCQDCSSKANLSGGVWKDNINMALVVDTYYDDQLISCGSVNRGTCQRHVFPHNHTADIQSEVHCIFSPQIEEPSQCPDCVVSALGAKVLSSVKDRFINFFVGNTINSSYFPDHPLHSISVRRLKETKDGFMFLTDQSYIDVLPEFRDSYPIKYVHAFESNNFIYFLTVQRETLDAQTFHTRIIRFCSINSGLHSYMEMPLECILTEKRKKRSTKKEVFNILQAAYVSKPGAQLARQIGASLNDDILFGVFAQSKPDSAEPMDRSAMCAFPIKYVNDFFNKIVNKNNVRCLQHFYGPNHEHCFNRTLLRNSSGCEARRDEYRTEFTTALQRVDLFMGQFSEVLLTSISTFIKGDLTIANLGTSEGRFMQVVVSRSGPSTPHVNFLLDSHPVSPEVIVEHTLNQNGYTLVITGKKITKIPLNGLGCRHFQSCSQCLSAPPFVQCGWCHDKCVRSEECLSGTWTQQICLPAIYKVFPNSAPLEGGTRLTICGWDFGFRRNNKFDLKKTRVLLGNESCTLTLSESTMNTLKCTVGPAMNKHFNMSIIISNGHGTTQYSTFSYVDPVITSISPKYGPMAGGTLLTLTGNYLNSGNSRHISIGGKTCTLKSVSNSILECYTPAQTISTEFAVKLKIDLANRETSIFSYREDPIVYEIHPTKSFISGGSTITGVGKNLNSVSVPRMVINVHEAGRNFTVACQHRSNSEIICCTTPSLQQLNLQLPLKTKAFFMLDGILSKYFDLIYVHNPVFKPFEKPVMISMGNENVLEIKGNDIDPEAVKGEVLKVGNKSCENIHLHSEAVLCTVPNDLLKLNSELNIEWKQAISSTVLGKVIVQPDQNFT

SEQ ID NO: 2726 - protein, 147 aa, synthetic construct
  REGION 1..147: note = MFAP3 (P55082) SP+PP+ECD
MKLHCCLFTLVASIIVPAAFVLEDVDFDQMVSLEANRSSYNASFPSSFELSASSHSDDDVIIAKEGTSVSIECLLTASHYEDVHWHNSKGQQLDGRSRGGKWLVSDNFLNITNVAFDDRGLYTCFVTSPIRASYSVTLRVIFTSGDM

SEQ ID NO: 2727 - protein, 149 aa, synthetic construct
  REGION 1..149: note = MFAP3L (O75121) SP+PP+ECD
MDRLKSHLTVCFLPSVPFLILVSTLATAKSVTNSTLNGTNVVLGSVPVIIARTDHIIVKEGNSALINCSVYGIPDPQFKWYNSIGKLLKEEEDEKERGGGKWQMHDSGLLNITKVSFSDRGKYTCVASNIYGTVNNTVTLRVIFTSGDM

SEQ ID NO: 2728 - protein, 307 aa, synthetic construct
  REGION 1..307: note = MICA (Q29983) SP+PP+ECD
MGLGPVFLLLAGIFPFAPPGAAAEPHSLRYNLTVLSWDGSVQSGFLTEVHLDGQPFLRCDRQKCRAKPQGQWAEDVLGNKTWDRETRDLTGNGKDLRMTLAHIKDQKEGLHSLQEIRVCEIHEDNSTRSSQHFYYDGELFLSQNLETKEWTMPQSSRAQTLAMNVRNFLKEDAMKTKTHYHAMHADCLQELRRYLKSGVVLRRTVPPMVNVTRSEASEGNITVTCRASGFYPWNITLSWRQDGVSLSHDTQQWGDVLPDGNGTYQTWVATRICQGEEQRFTCYMEHSGNHSTHPVPSGKVLVLQSHW

SEQ ID NO: 2729 - protein, 309 aa, synthetic construct
  REGION 1..309: note = MICB (Q29980) SP+PP+ECD
MGLGRVLLFLAVAFPFAPPAAAAEPHSLRYNLMVLSQDESVQSGFLAEGHLDGQPFLRYDRQKRRAKPQGQWAEDVLGAKTWDTETEDLTENGQDLRRTLTHIKDQKGGLHSLQEIRVCEIHEDSSTRGSRHFYYDGELFLSQNLETQESTVPQSSRAQTLAMNVTNFWKEDAMKTKTHYRAMQADCLQKLQRYLKSGVAIRRTVPPMVNVTCSEVSEGNITVTCRASSFYPRNITLTWRQDGVSLSHNTQQWGDVLPDGNGTYQTWVATRIRQGEEQRFTCYMEHSGNHGTHPVPSGKVLVLQSQRTD

SEQ ID NO: 2730 - protein, 227 aa, synthetic construct
  REGION 1..227: note = MILR1 (Q7Z6M3) SP+PP+ECD
MWSHLNRLLFWSIFSSVTCRKAVLDCEAMKTNEFPSPCLDSKTKVVMKGQNVSMFCSHKNKSLQITYSLFRRKTHLGTQDGKGEPAIFNLSITEAHESGPYKCKAQVTSCSKYSRDFSFTIVDPVTSPVLNIMVIQTETDRHITLHCLSVNGSLPINYTFFENHVAISPAISKYDREPAEFNLTKKNPGEEEEYRCEAKNRLPNYATYSHPVTMPSTGGDSCPFCLK

SEQ ID NO: 2731 - protein, 541 aa, synthetic construct
  REGION 1..541: note = MMP14 (P50281) SP+PP+ECD
MSPAPRPPRCLLLPLLTLGTALASLGSAQSSSFSPEAWLQQYGYLPPGDLRTHTQRSPQSLSAAIAAMQKFYGLQVTGKADADTMKAMRRPRCGVPDKFGAEIKANVRRKRYAIQGLKWQHNEITFCIQNYTPKVGEYATYEAIRKAFRVWESATPLRFREVPYAYIREGHEKQADIMIFFAEGFHGDSTPFDGEGGFLAHAYFPGPNIGGDTHFDSAEPWTVRNEDLNGNDIFLVAVHELGHALGLEHSSDPSAIMAPFYQWMDTENFVLPDDDRRGIQQLYGGESGFPTKMPPQPRTTSRPSVPDKPKNPTYGPNICDGNFDTVAMLRGEMFVFKERWFWRVRNNQVMDGYPMPIGQFWRGLPASINTAYERKDGKFVFFKGDKHWVFDEASLEPGYPKHIKELGRGLPTDKIDAALFWMPNGKTYFFRGNKYYRFNEELRAVDSEYPKNIKVWEGIPESPRGSFMGSDEVFTYFYKGNKYWKFNNQKLKVEPGYPKSALRDWMGCPSGGRPDEGTEEETEVIIIEVDEEGGGAVSAAA

SEQ ID NO: 2732 - protein, 564 aa, synthetic construct
  REGION 1..564: note = MMP16 (P51512) SP+PP+ECD
MILLTFSTGRRLDFVHHSGVFFLQTLLWILCATVCGTEQYFNVEVWLQKYGYLPPTDPRMSVLRSAETMQSALAAMQQFYGINMTGKVDRNTIDWMKKPRCGVPDQTRGSSKFHIRRKRYALTGQKWQHKHITYSIKNVTPKVGDPETRKAIRRAFDVWQNVTPLTFEEVPYSELENGKRDVDITIIFASGFHGDSSPFDGEGGFLAHAYFPGPGIGGDTHFDSDEPWTLGNPNHDGNDLFLVAVHELGHALGLEHSNDPTAIMAPFYQYMETDNFKLPNDDLQGIQKIYGPPDKIPPPTRPLPTVPPHRSIPPADPRKNDRPKPPRPPTGRPSYPGAKPNICDGNFNTLAILRREMFVFKDQWFWRVRNNRVMDGYPMQITYFWRGLPPSIDAVYENSDGNFVFFKGNKYWVFKDTTLQPGYPHDLITLGSGIPPHGIDSAIWWEDVGKTYFFKGDRYWRYSEEMKTMDPGYPKPITVWKGIPESPQGAFVHKENGFTYFYKGKEYWKFNNQILKVEPGYPRSILKDFMGCDGPTDRVKEGHSPPDDVDIVIKLDNTASTVKA

SEQ ID NO: 2733 - protein, 655 aa, synthetic construct
  REGION 1..655: note = MPEG1 (Q2M385) SP+PP+ECD
MNNFRATILFWAAAAWAKSGKPSGEMDEVGVQKCKNALKLPVLEVLPGGGWDNLRNVDMGRVMELTYSNCRTTEDGQYIIPDEIFTIPQKQSNLEMNSEILESWANYQSSTSYSINTELSLFSKVNGKFSTEFQRMKTLQVKDQAITTRVQVRNLVYTVKINPTLELSSGFRKELLDISDRLENNQTRMATYLAELLVLNYGTHVTTSVDAGAALIQEDHLRASFLQDSQSSRSAVTASAGLAFQNTVNFKFEENYTSQNVLTKSYLSNRTNSRVQSIGGVPFYPGITLQAWQQGITNHLVAIDRSGLPLHFFINPNMLPDLPGPLVKKVSKTVETAVKRYYTFNTYPGCTDLNSPNFNFQANTDDGSCEGKMTNFSFGGVYQECTQLSGNRDVLLCQKLEQKNPLTGDFSCPSGYSPVHLLSQIHEEGYNHLECHRKCTLLVFCKTVCEDVFQVAKAEFRAFWCVASSQVPENSGLLFGGLFSSKSINPMTNAQSCPAGYFPLRLFENLKVCVSQDYELGSRFAVPFGGFFSCTVGNPLVDPAISRDLGAPSLKKCPGGFSQHPALISDGCQVSYCVKSGLFTGGSLPPARLPPFTRPPLMSQAATNTVIVTNSENARSWIKDSQTHQWRLGEPIELRRAMNVIHGDGGGLSGG

SEQ ID NO: 2734 - protein, 491 aa, synthetic construct
  REGION 1..491: note = MPL (P40238) SP+PP+ECD
MPSWALFMVTSCLLLAPQNLAQVSSQDVSLLASDSEPLKCFSRTFEDLTCFWDEEEAAPSGTYQLLYAYPREKPRACPLSSQSMPHFGTRYVCQFPDQEEVRLFFPLHLWVKNVFLNQTRTQRVLFVDSVGLPAPPSIIKAMGGSQPGELQISWEEPAPEISDFLRYELRYGPRDPKNSTGPTVIQLIATETCCPALQRPHSASALDQSPCAQPTMPWQDGPKQTSPSREASALTAEGGSCLISGLQPGNSYWLQLRSEPDGISLGGSWGSWSLPVTVDLPGDAVALGLQCFTLDLKNVTCQWQQQDHASSQGFFYHSRARCCPRDRYPIWENCEEEEKTNPGLQTPQFSRCHFKSRNDSIIHILVEVTTAPGTVHSYLGSPFWIHQAVRLPTPNLHWREISSGHLELEWQHPSSWAAQETCYQLRYTGEGHQDWKVLEPPLGARGGTLELRPRSRYRLQLRARLNGPTYQGPWSSWSDPTRVETATETAW

SEQ ID NO: 2735 - protein, 153 aa, synthetic construct
  REGION 1..153: note = MPZ (P25189) SP+PP+ECD
MAPGAPSSSPSPILAVLLFSSLVLSPAQAIVVYTDREVHGAVGSRVTLHCSFWSSEWVSDDISFTWRYQPEGGRDAISIFHYAKGQPYIDEVGTFKERIQWVGDPRWKDGSIVIHNLDYSDNGTFTCDVKNPPDIVGKTSQVTLYVFEKVPTR

SEQ ID NO: 2736 - protein, 162 aa, synthetic construct
  REGION 1..162: note = MPZL1 (O95297) SP+PP+ECD
MAASAGAGAVIAAPDSRRWLWSVLAAALGLLTAGVSALEVYTPKEIFVANGTQGKLTCKFKSTSTTGGLTSVSWSFQPEGADTTVSFFHYSQGQVYLGNYPPFKDRISWAGDLDKKDASINIENMQFIHNGTYICDVKNPPDIVVQPGHIRLYVVEKENLPV

SEQ ID NO: 2737 - protein, 154 aa, synthetic construct
  REGION 1..154: note = MPZL2 (O60487) SP+PP+ECD
MYGKSSTRAVLLLLGIQLTALWPIAAVEIYTSRVLEAVNGTDARLKCTFSSFAPVGDALTVTWNFRPLDGGPEQFVFYYHIDPFQPMSGRFKDRVSWDGNPERYDASILLWKLQFDDNGTYTCQVKNPPDVDGVIGEIRLSVVHTVRFSEIHFL

SEQ ID NO: 2738 - protein, 158 aa, synthetic construct
  REGION 1..158: note = MPZL3 (Q6UWV2) SP+PP+ECD
MQQRGAAGSRGCALFPLLGVLFFQGVYIVFSLEIRADAHVRGYVGEKIKLKCTFKSTSDVTDKLTIDWTYRPPSSSHTVSIFHYQSFQYPTTAGTFRDRISWVGNVYKGDASISISNPTIKDNGTFSCAVKNPPDVHHNIPMTELTVTERGFGTMLSS

SEQ ID NO: 2739 - protein, 302 aa, synthetic construct
  REGION 1..302: note = MR1 (Q95460) SP+PP+ECD
MGELMAFLLPLIIVLMVKHSDSRTHSLRYFRLGVSDPIHGVPEFISVGYVDSHPITTYDSVTRQKEPRAPWMAENLAPDHWERYTQLLRGWQQMFKVELKRLQRHYNHSGSHTYQRMIGCELLEDGSTTGFLQYAYDGQDFLIFNKDTLSWLAVDNVAHTIKQAWEANQHELLYQKNWLEEECIAWLKRFLEYGKDTLQRTEPPLVRVNRKETFPGVTALFCKAHGFYPPEIYMTWMKNGEEIVQEIDYGDILPSGDGTYQAWASIELDPQSSNLYSCHVEHCGVHMVLQVPQESETIPLVM

SEQ ID NO: 2740 - protein, 1389 aa, synthetic construct
  REGION 1..1389: note = MRC1 (P22897) SP+PP+ECD
MRLPLLLVFASVIPGAVLLLDTRQFLIYNEDHKRCVDAVSPSAVQTAACNQDAESQKFRWVSESQIMSVAFKLCLGVPSKTDWVAITLYACDSKSEFQKWECKNDTLLGIKGEDLFFNYGNRQEKNIMLYKGSGLWSRWKIYGTTDNLCSRGYEAMYTLLGNANGATCAFPFKFENKWYADCTSAGRSDGWLWCGTTTDYDTDKLFGYCPLKFEGSESLWNKDPLTSVSYQINSKSALTWHQARKSCQQQNAELLSITEIHEQTYLTGLTSSLTSGLWIGLNSLSFNSGWQWSDRSPFRYLNWLPGSPSAEPGKSCVSLNPGKNAKWENLECVQKLGYICKKGNTTLNSFVIPSESDVPTHCPSQWWPYAGHCYKIHRDEKKIQRDALTTCRKEGGDLTSIHTIEELDFIISQLGYEPNDELWIGLNDIKIQMYFEWSDGTPVTFTKWLRGEPSHENNRQEDCVVMKGKDGYWADRGCEWPLGYICKMKSRSQGPEIVEVEKGCRKGWKKHHFYCYMIGHTLSTFAEANQTCNNENAYLTTIEDRYEQAFLTSFVGLRPEKYFWTGLSDIQTKGTFQWTIEEEVRFTHWNSDMPGRKPGCVAMRTGIAGGLWDVLKCDEKAKFVCKHWAEGVTHPPKPTTTPEPKCPEDWGASSRTSLCFKLYAKGKHEKKTWFESRDFCRALGGDLASINNKEEQQTIWRLITASGSYHKLFWLGLTYGSPSEGFTWSDGSPVSYENWAYGEPNNYQNVEYCGELKGDPTMSWNDINCEHLNNWICQIQKGQTPKPEPTPAPQDNPPVTEDGWVIYKDYQYYFSKEKETMDNARAFCKRNFGDLVSIQSESEKKFLWKYVNRNDAQSAYFIGLLISLDKKFAWMDGSKVDYVSWATGEPNFANEDENCVTMYSNSGFWNDINCGYPNAFICQRHNSSINATTVMPTMPSVPSGCKEGWNFYSNKCFKIFGFMEEERKNWQEARKACIGFGGNLVSIQNEKEQAFLTYHMKDSTFSAWTGLNDVNSEHTFLWTDGRGVHYTNWGKGYPGGRRSSLSYEDADCVVIIGGASNEAGKWMDDTCDSKRGYICQTRSDPSLTNPPATIQTDGFVKYGKSSYSLMRQKFQWHEAETYCKLHNSLIASILDPYSNAFAWLQMETSNERVWIALNSNLTDNQYTWTDKWRVRYTNWAADEPKLKSACVYLDLDGYWKTAHCNESFYFLCKRSDEIPATEPPQLPGRCPESDHTAWIPFHGHCYYIESSYTRNWGQASLECLRMGSSLVSIESAAESSFLSYRVEPLKSKTNFWIGLFRNVEGTWLWINNSPVSFVNWNTGDPSGERNDCVALHASSGFWSNIHCSSYKGYICKRPKIIDAKPTHELLTTKADTRKMDPSKPSSNVA

SEQ ID NO: 2741 - protein, 1414 aa, synthetic construct
  REGION 1..1414: note = MRC2 (Q9UBG0) SP+PP+ECD
MGPGRPAPAPWPRHLLRCVLLLGCLHLGRPGAPGDAALPEPNVFLIFSHGLQGCLEAQGGQVRVTPACNTSLPAQRWKWVSRNRLFNLGTMQCLGTGWPGTNTTASLGMYECDREALNLRWHCRTLGDQLSLLLGARTSNISKPGTLERGDQTRSGQWRIYGSEEDLCALPYHEVYTIQGNSHGKPCTIPFKYDNQWFHGCTSTGREDGHLWCATTQDYGKDERWGFCPIKSNDCETFWDKDQLTDSCYQFNFQSTLSWREAWASCEQQGADLLSITEIHEQTYINGLLTGYSSTLWIGLNDLDTSGGWQWSDNSPLKYLNWESDQPDNPSEENCGVIRTESSGGWQNRDCSIALPYVCKKKPNATAEPTPPDRWANVKVECEPSWQPFQGHCYRLQAEKRSWQESKKACLRGGGDLVSIHSMAELEFITKQIKQEVEELWIGLNDLKLQMNFEWSDGSLVSFTHWHPFEPNNFRDSLEDCVTIWGPEGRWNDSPCNQSLPSICKKAGQLSQGAAEEDHGCRKGWTWHSPSCYWLGEDQVTYSEARRLCTDHGSQLVTITNRFEQAFVSSLIYNWEGEYFWTALQDLNSTGSFFWLSGDEVMYTHWNRDQPGYSRGGCVALATGSAMGLWEVKNCTSFRARYICRQSLGTPVTPELPGPDPTPSLTGSCPQGWASDTKLRYCYKVFSSERLQDKKSWVQAQGACQELGAQLLSLASYEEEHFVANMLNKIFGESEPEIHEQHWFWIGLNRRDPRGGQSWRWSDGVGFSYHNFDRSRHDDDDIRGCAVLDLASLQWVAMQCDTQLDWICKIPRGTDVREPDDSPQGRREWLRFQEAEYKFFEHHSTWAQAQRICTWFQAELTSVHSQAELDFLSHNLQKFSRAQEQHWWIGLHTSESDGRFRWTDGSIINFISWAPGKPRPVGKDKKCVYMTASREDWGDQRCLTALPYICKRSNVTKETQPPDLPTTALGGCPSDWIQFLNKCFQVQGQEPQSRVKWSEAQFSCEQQEAQLVTITNPLEQAFITASLPNVTFDLWIGLHASQRDFQWVEQEPLMYANWAPGEPSGPSPAPSGNKPTSCAVVLHSPSAHFTGRWDDRSCTEETHGFICQKGTDPSLSPSPAALPPAPGTELSYLNGTFRLLQKPLRWHDALLLCESRNASLAYVPDPYTQAFLTQAARGLRTPLWIGLAGEEGSRRYSWVSEEPLNYVGWQDGEPQQPGGCTYVDVDGAWRTTSCDTKLQGAVCGVSSGPPPPRRISYHGSCPQGLADSAWIPFREHCYSFHMELLLGHKEARQRCQRAGGAVLSILDEMENVFVWEHLQSYEGQSRGAWLGMNFNPKGGTLVWQDNTAVNYSNWGPPGLGPSMLSHNSCYWIQSNSGLWRPGACTNITMGVVCKLPRAEQSSFSPSALPENPAA

SEQ ID NO: 2742 - protein, 843 aa, synthetic construct; identical to SEQ ID NO: 1638
  REGION 1..843: note = MRVI1 (Q9Y6F6) SP+PP+ECD

SEQ ID NO: 2743 - protein, 638 aa, synthetic construct
  REGION 1..638: note = MSLNL (Q96KJ4) SP+PP+ECD
MAAAVTIPGPRIGALQSSGLTLLLSLAAHCSGPQAKVLSPGGLDASGANLWASANCSLLQGFWCQPASQLPRDQLSALIQRLALLQVPLQAWQLSCLANLASRCGLQDDFTLHPPNLLLFYNLSQVREADCRAFIRRAAQGDVELLSHLPDQRVALWRAAVACLVGAGLRLSASDQQLLGALVCDMDASSIGAADPHMLENLRRCPRLTAAQRIALNSLLAGGKTSLGPPGSWTLEGLQALGPLATYISPHLWAQVQEAVGLGFFRSVVASCQVGRLGQREARCFVTSFLESKTKPVSSRPRLSTGNITAATLRDDLFLVHYDCAELESCLDGCILRTNLDTLLQHLLPTECQHVVKAKLAQIYPQGLPEDQLRLITSLVYLYSRTEIGQWSITSQDTVMALLASDVALENQTEAVLQKFLEHNGTVSGALLLAIGGTRLCWMSPHQIQTIHPQELRLAGALDLSSCPQSRKDVLYTKAHETFGSSGTLAAYYRLMRPYLGGSPGGAQPPSPVPPGGAPVEELRHLAHANISMDIDTFTSLNPLELQSLDVGNVTALLGHNVGDLQKARSHPTVRAWLRSLNSSTLGQLGLDASPTSPTGPAHGTRGPPSTTHQVLHLVHTSGLPTNDAQASTSGSLW

SEQ ID NO: 2744 - protein, 957 aa, synthetic construct
  REGION 1..957: note = MST1R (Q04912) SP+PP+ECD
MELLPPLPQSFLLLLLLPAKPAAGEDWQCPRTPYAASRDFDVKYVVPSFSAGGLVQAMVTYEGDRNESAVFVAIRNRLHVLGPDLKSVQSLATGPAGDPGCQTCAACGPGPHGPPGDTDTKVLVLDPALPALVSCGSSLQGRCFLHDLEPQGTAVHLAAPACLFSAHHNRPDDCPDCVASPLGTRVTVVEQGQASYFYVASSLDAAVAASFSPRSVSIRRLKADASGFAPGFVALSVLPKHLVSYSIEYVHSFHTGAFVYFLTVQPASVTDDPSALHTRLARLSATEPELGDYRELVLDCRFAPKRRRRGAPEGGQPYPVLRVAHSAPVGAQLATELSIAEGQEVLFGVFVTGKDGGPGVGPNSVVCAFPIDLLDTLIDEGVERCCESPVHPGLRRGLDFFQSPSFCPNPPGLEALSPNTSCRHFPLLVSSSFSRVDLFNGLLGPVQVTALYVTRLDNVTVAHMGTMDGRILQVELVRSLNYLLYVSNFSLGDSGQPVQRDVSRLGDHLLFASGDQVFQVPIQGPGCRHFLTCGRCLRAWHFMGCGWCGNMCGQQKECPGSWQQDHCPPKLTEFHPHSGPLRGSTRLTLCGSNFYLHPSGLVPEGTHQVTVGQSPCRPLPKDSSKLRPVPRKDFVEEFECELEPLGTQAVGPTNVSLTVTNMPPGKHFRVDGTSVLRGFSFMEPVLIAVQPLFGPRAGGTCLTLEGQSLSVGTSRAVLVNGTECLLARVSEGQLLCATPPGATVASVPLSLQVGGAQVPGSWTFQYREDPVVLSISPNCGYINSHITICGQHLTSAWHLVLSFHDGLRAVESRCERQLPEQQLCRLPEYVVRDPQGWVAGNLSARGDGAAGFTLPGFRFLPPPHPPSANLVPLKPEEHAIKFEYIGLGAVADCVGINVTVGGESCQHEFRGDMVVCPLPPSLQLGQDGAPLQVCVDGECHILGRVVRPGPDGVPQST

SEQ ID NO: 2745 - protein, 1158 aa, synthetic construct
  REGION 1..1158: note = MUC1 (P15941) SP+PP+ECD
MTPGTQSPFFLLLLLTVLTVVTGSGHASSTPGGEKETSATQRSSVPSSTEKNAVSMTSSVLSSHSPGSGSSTTQGQDVTLAPATEPASGSAATWGQDVTSVPVTRPALGSTTPPAHDVTSAPDNKPAPGSTAPPAHGVTSAPDTRPAPGSTAPPAHGVTSAPDTRPAPGSTAPPAHGVTSAPDTRPAPGSTAPPAHGVTSAPDTRPAPGSTAPPAHGVTSAPDTRPAPGSTAPPAHGVTSAPDTRPAPGSTAPPAHGVTSAPDTRPAPGSTAPPAHGVTSAPDTRPAPGSTAPPAHGVTSAPDTRPAPGSTAPPAHGVTSAPDTRPAPGSTAPPAHGVTSAPDTRPAPGSTAPPAHGVTSAPDTRPAPGSTAPPAHGVTSAPDTRPAPGSTAPPAHGVTSAPDTRPAPGSTAPPAHGVTSAPDTRPAPGSTAPPAHGVTSAPDTRPAPGSTAPPAHGVTSAPDTRPAPGSTAPPAHGVTSAPDTRPAPGSTAPPAHGVTSAPDTRPAPGSTAPPAHGVTSAPDTRPAPGSTAPPAHGVTSAPDTRPAPGSTAPPAHGVTSAPDTRPAPGSTAPPAHGVTSAPDTRPAPGSTAPPAHGVTSAPDTRPAPGSTAPPAHGVTSAPDTRPAPGSTAPPAHGVTSAPDTRPAPGSTAPPAHGVTSAPDTRPAPGSTAPPAHGVTSAPDTRPAPGSTAPPAHGVTSAPDTRPAPGSTAPPAHGVTSAPDTRPAPGSTAPPAHGVTSAPDTRPAPGSTAPPAHGVTSAPDTRPAPGSTAPPAHGVTSAPDTRPAPGSTAPPAHGVTSAPDTRPAPGSTAPPAHGVTSAPDTRPAPGSTAPPAHGVTSAPDTRPAPGSTAPPAHGVTSAPDTRPAPGSTAPPAHGVTSAPDTRPAPGSTAPPAHGVTSAPDTRPAPGSTAPPAHGVTSAPDTRPAPGSTAPPAHGVTSAPDNRPALGSTAPPVHNVTSASGSASGSASTLVHNGTSARATTTPASKSTPFSIPSHHSDTPTTLASHSTKTDASSTHHSSVPPLTSSNHSTSPQLSTGVSFFFLSFHISNLQFNSSLEDPSTDYYQELQRDISEMFLQIYKQGGFLGLSNIKFRPGSVVVQLTLAFREGTINVHDVETQFNQYKTEAASRYNLTISDVSVSDVPFPFSAQSGAGVPG

SEQ ID NO: 2746 - protein, 5380 aa, synthetic construct
  REGION 1..5380: note = MUC12 (Q9UKN1) SP+PP+ECD
MLVIWILTLALRLCASVTTVTPEGSAVHKAISQQGTLWTGEVLEKQTVEQGKSTLRRQKNHFHRSAGELRCRNALKDEGASAGWSVMFAGESVVVLVHLWMTGARVKNLGLVEFASPGDDGDGRAEGFSLGLPLSEQARAAGAREKERQETVINHSTFSGFSQITGSTVNTSIGGNTTSASTPSSSDPFTTFSDYGVSVTFITGSTATKHFLDSSTNSGHSEESTVSHSGPGATGTTLFPSHSATSVFVGEPKTSPITSASMETTALPGSTTTAGLSEKSTTFYSSPRSPDRTLSPARTTSSGVSEKSTTSHSRPGPTHTIAFPDSTTMPGVSQESTASHSIPGSTDTTLSPGTTTPSSLGPESTTFHSSPGYTKTTRLPDNTTTSGLLEASTPVHSSTGSPHTTLSPSSSTTHEGEPTTFQSWPSSKDTSPAPSGTTSAFVKLSTTYHSSPSSTPTTHFSASSTTLGHSEESTPVHSSPVATATTPPPARSATSGHVEESTAYHRSPGSTQTMHFPESSTTSGHSEESATFHGSTTHTKSSTPSTTAALAHTSYHSSLGSTETTHFRDSSTISGRSEESKASHSSPDAMATTVLPAGSTPSVLVGDSTPSPISSGSMETTALPGSTTKPGLSEKSTTFYSSPRSPDTTHLPASMTSSGVSEESTTSHSRPGSTHTTAFPGSTTMPGLSQESTASHSSPGPTDTTLSPGSTTASSLGPEYTTFHSRPGSTETTLLPDNTTASGLLEASMPVHSSTRSPHTTLSPAGSTTRQGESTTFHSWPSSKDTRPAPPTTTSAFVEPSTTSHGSPSSIPTTHISARSTTSGLVEESTTYHSSPGSTQTMHFPESDTTSGRGEESTTSHSSTTHTISSAPSTTSALVEEPTSYHSSPGSTATTHFPDSSTTSGRSEESTASHSSQDATGTIVLPARSTTSVLLGESTTSPISSGSMETTALPGSTTTPGLSERSTTFHSSPRSPATTLSPASTTSSGVSEESTTSRSRPGSTHTTAFPDSTTTPGLSRHSTTSHSSPGSTDTTLLPASTTTSGPSQESTTSHSSSGSTDTALSPGSTTALSFGQESTTFHSNPGSTHTTLFPDSTTSSGIVEASTRVHSSTGSPRTTLSPASSTSPGLQGESTAFQTHPASTHTTPSPPSTATAPVEESTTYHRSPGSTPTTHFPASSTTSGHSEKSTIFHSSPDASGTTPSSAHSTTSGRGESTTSRISPGSTEITTLPGSTTTPGLSEASTTFYSSPRSPTTTLSPASMTSLGVGEESTTSRSQPGSTHSTVSPASTTTPGLSEESTTVYSSSRGSTETTVFPHSTTTSVHGEEPTTFHSRPASTHTTLFTEDSTTSGLTEESTAFPGSPASTQTGLPATLTTADLGEESTTFPSSSGSTGTKLSPARSTTSGLVGESTPSRLSPSSTETTTLPGSPTTPSLSEKSTTFYTSPRSPDATLSPATTTSSGVSEESSTSHSQPGSTHTTAFPDSTTTSDLSQEPTTSHSSQGSTEATLSPGSTTASSLGQQSTTFHSSPGDTETTLLPDDTITSGLVEASTPTHSSTGSLHTTLTPASSTSAGLQEESTTFQSWPSSSDTTPSPPGTTAAPVEVSTTYHSRPSSTPTTHFSASSTTLGRSEESTTVHSSPGATGTALFPTRSATSVLVGEPTTSPISSGSTETTALPGSTTTAGLSEKSTTFYSSPRSPDTTLSPASTTSSGVSEESTTSHSRPGSTHTTAFPGSTTMPGVSQESTASHSSPGSTDTTLSPGSTTASSLGPESTTFHSSPGSTETTLLPDNTTASGLLEASTPVHSSTGSPHTTLSPAGSTTRQGESTTFQSWPSSKDTMPAPPTTTSAFVELSTTSHGSPSSTPTTHFSASSTTLGRSEESTTVHSSPVATATTPSPARSTTSGLVEESTAYHSSPGSTQTMHFPESSTASGRSEESRTSHSSTTHTISSPPSTTSALVEEPTSYHSSPGSTATTHFPDSSTTSGRSEESTASHSSQDATGTIVLPARSTTSVLLGESTTSPISSGSMETTALPGSTTTPGLSEKSTTFHSSPRSPATTLSPASTTSSGVSEESTTSHSRPGSTHTTAFPDSTTTPGLSRHSTTSHSSPGSTDTTLLPASTTTSGPSQESTTSHSSPGSTDTALSPGSTTALSFGQESTTFHSSPGSTHTTLFPDSTTSSGIVEASTRVHSSTGSPRTTLSPASSTSPGLQGESTAFQTHPASTHTTPSPPSTATAPVEESTTYHRSPGSTPTTHFPASSTTSGHSEKSTIFHSSPDASGTTPSSAHSTTSGRGESTTSRISPGSTEITTLPGSTTTPGLSEASTTFYSSPRSPTTTLSPASMTSLGVGEESTTSRSQPGSTHSTVSPASTTTPGLSEESTTVYSSSPGSTETTVFPRTPTTSVRGEEPTTFHSRPASTHTTLFTEDSTTSGLTEESTAFPGSPASTQTGLPATLTTADLGEESTTFPSSSGSTGTTLSPARSTTSGLVGESTPSRLSPSSTETTTLPGSPTTPSLSEKSTTFYTSPRSPDATLSPATTTSSGVSEESSTSHSQPGSTHTTAFPDSTTTPGLSRHSTTSHSSPGSTDTTLLPASTTTSGPSQESTTSHSSPGSTDTALSPGSTTALSFGQESTTFHSSPGSTHTTLFPDSTTSSGIVEASTRVHSSTGSPRTTLSPASSTSPGLQGESTTFQTHPASTHTTPSPPSTATAPVEESTTYHRSPGSTPTTHFPASSTTSGHSEKSTIFHSSPDASGTTPSSAHSTTSGRGESTTSRISPGSTEITTLPGSTTTPGLSEASTTFYSSPRSPTTTLSPASMTSLGVGEESTTSRSQPGSTHSTVSPASTTTPGLSEESTTVYSSSPGSTETTVFPRSTTTSVRGEEPTTFHSRPASTHTTLFTEDSTTSGLTEESTAFPGSPASTQTGLPATLTTADLGEESTTFPSSSGSTGTTLSPARSTTSGLVGESTPSRLSPSSTETTTLPGSPTTPSLSEKSTTFYTSPRSPDATLSPATTTSSGVSEESSTSHSQPGSTHTTAFPDSTTTSGLSQEPTASHSSQGSTEATLSPGSTTASSLGQQSTTFHSSPGDTETTLLPDDTITSGLVEASTPTHSSTGSLHTTLTPASSTSAGLQEESTTFQSWPSSSDTTPSPPGTTAAPVEVSTTYHSRPSSTPTTHFSASSTTLGRSEESTTVHSSPGATGTALFPTRSATSVLVGEPTTSPISSGSTETTALPGSTTTAGLSEKSTTFYSSPRSPDTTLSPASTTSSGVSEESTTSHSRPGSTHTTAFPGSTTMPGVSQESTASHSSPGSTDTTLSPGSTTASSLGPESTTFHSGPGSTETTLLPDNTTASGLLEASTPVHSSTGSPHTTLSPAGSTTRQGESTTFQSWPNSKDTTPAPPTTTSAFVELSTTSHGSPSSTPTTHFSASSTTLGRSEESTTVHSSPVATATTPSPARSTTSGLVEESTTYHSSPGSTQTMHFPESDTTSGRGEESTTSHSSTTHTISSAPSTTSALVEEPTSYHSSPGSTATTHFPDSSTTSGRSEESTASHSSQDATGTIVLPARSTTSVLLGESTTSPISSGSMETTALPGSTTTPGLSEKSTTFHSSPRSPATTLSPASTTSSGVSEESTTSHSRPGSTHTTAFPDSTTTPGLSRHSTTSHSSPGSTDTTLLPASTTTSGSSQESTTSHSSSGSTDTALSPGSTTALSFGQESTTFHSSPGSTHTTLFPDSTTSSGIVEASTRVHSSTGSPRTTLSPASSTSPGLQGESTAFQTHPASTHTTPSPPSTATAPVEESTTYHRSPGSTPTTHFPASSTTSGHSEKSTIFHSSPDASGTTPSSAHSTTSGRGESTTSRISPGSTEITTLPGSTTTPGLSEASTTFYSSPRSPTTTLSPASMTSLGVGEESTTSRSQPGSTHSTVSPASTTTPGLSEESTTVYSSSPGSTETTVFPRSTTTSVRREEPTTFHSRPASTHTTLFTEDSTTSGLTEESTAFPGSPASTQTGLPATLTTADLGEESTTFPSSSGSTGTKLSPARSTTSGLVGESTPSRLSPSSTETTTLPGSPTTPSLSEKSTTFYTSPRSPDATLSPATTTSSGVSEESSTSHSQPGSTHTTAFPDSTTTSGLSQEPTTSHSSQGSTEATLSPGSTTASSLGQQSTTFHSSPGDTETTLLPDDTITSGLVEASTPTHSSTGSLHTTLTPASSTSTGLQEESTTFQSWPSSSDTTPSPPSTTAVPVEVSTTYHSRPSSTPTTHFSASSTTLGRSEESTTVHSSPGATGTALFPTRSATSVLVGEPTTSPISSGSTETTALPGSTTTAGLSEKSTTFYSSPRSPDTTLSPASTTSSGVSEESTTSHSRPGSMHTTAFPSSTTMPGVSQESTASHSSPGSTDTTLSPGSTTASSLGPESTTFHSSPGSTETTLLPDNTTASGLLEASTPVHSSTGSPHTTLSPAGSTTRQGESTTFQSWPNSKDTTPAPPTTTSAFVELSTTSHGSPSSTPTTHFSASSTTLGRSEESTTVHSSPVATATTPSPARSTTSGLVEESTTYHSSPGSTQTMHFPESNTTSGRGEESTTSHSSTTHTISSAPSTTSALVEEPTSYHSSPGSTATTHFPDSSTTSGRSEESTASHSSQDATGTIVLPARSTTSVLLGESTTSPISSGSMETTALPGSTTTPGLSEKSTTFHSSPSSTPTTHFSASSTTLGRSEESTTVHSSPVATATTPSPARSTTSGLVEESTAYHSSPGSTQTMHFPESSTASGRSEESRTSHSSTTHTISSPPSTTSALVEEPTSYHSSPGSIATTHFPESSTTSGRSEESTASHSSPDTNGITPLPAHFTTSGRIAESTTFYISPGSMETTLASTATTPGLSAKSTILYSSSRSPDQTLSPASMTSSSISGEPTSLYSQAESTHTTAFPASTTTSGLSQESTTFHSKPGSTETTLSPGSITTSSFAQEFTTPHSQPGSALSTVSPASTTVPGLSEESTTFYSSPGSTETTAFSHSNTMSIHSQQSTPFPDSPGFTHTVLPATLTTTDIGQESTAFHSSSDATGTTPLPARSTASDLVGEPTTFYISPSPTYTTLFPASSSTSGLTEESTTFHTSPSFTSTIVSTESLETLAPGLCQEGQIWNGKQCVCPQGYVGYQCLSPLESFPVETPEKLNATLGMTVKVTYRNFTEKMNDASSQEYQNFSTLFKNRMDVVLKGDNLPQYRGVNIRRLLNGSIVVKNDVILEADYTLEYEELFENLAEIVKAKIMNETRTTLLDPDSCRKAILCYSEEDTFVDSSVTPGFDFQEQCTQKAAEGYTQFYYVDVLDGKLACVNKCTKGTKSQMNCNLGTCQLQRSGPRCLCPNTNTHWYWGETCEFNIAKSLVY

SEQ ID NO: 2747 - protein, 421 aa, synthetic construct
  REGION 1..421: note = MUC13 (Q9H3R2) SP+PP+ECD
MKAIIHLTLLALLSVNTATNQGNSADAVTTTETATSGPTVAAADTTETNFPETASTTANTPSFPTATSPAPPIISTHSSSTIPTPAPPIISTHSSSTIPIPTAADSESTTNVNSLATSDIITASSPNDGLITMVPSETQSNNEMSPTTEDNQSSGPPTGTALLETSTLNSTGPSNPCQDDPCADNSLCVKLHNTSFCLCLEGYYYNSSTCKKGKVFPGKISVTVSETFDPEEKHSMAYQDLHSEITSLFKDVFGTSVYGQTVILTVSTSLSPRSEMRADDKFVNVTIVTILAETTSDNEKTVTEKINKAIRSSSSNFLNYDLTLRCDYYGCNQTADDCLNGLACDCKSDLQRPNPQSPFCVASSLKCPDACNAQHKQCLIKKSGGAPECACVPGYQEDANGNCQKCAFGYSGLDCKDKFQL

SEQ ID NO: 2748 - protein, 236 aa, synthetic construct
  REGION 1..236: note = MUC15 (Q8N387) SP+PP+ECD
MLALAKILLISTLFYSLLSGSHGKENQDINTTQNIAEVFKTMENKPISLESEANLNSDKENITTSNLKASHSPPLNLPNNSHGITDFSSNSSAEHSLGSLKPTSTISTSPPLIHSFVSKVPWNAPIADEDLLPISAHPNATPALSSENFTWSLVNDTVKTPDNSSITVSILSSEPTSPSVTPLIVEPSGWLTTNSDSFTGFTPYQEKTTLQPTLKFTNNSKLFPNTSDPQKENRNT

SEQ ID NO: 2749 - protein, 4393 aa, synthetic construct
  REGION 1..4393: note = MUC17 (Q685J3) SP+PP+ECD
MPRPGTMALCLLTLVLSLLPPQAAAEQDLSVNRAVWDGGGCISQGDVLNRQCQQLSQHVRTGSAANTATGTTSTNVVEPRMYLSCSTNPEMTSIESSVTSDTPGVSSTRMTPTESRTTSESTSDSTTLFPSSTEDTSSPTTPEGTDVPMSTPSEESISSTMAFVSTAPLPSFEAYTSLTYKVDMSTPLTTSTQASSSPTTPESTTIPKSTNSEGSTPLTSMPASTMKVASSEAITLLTTPVEISTPVTISAQASSSPTTAEGPSLSNSAPSGGSTPLTRMPLSVMLVVSSEASTLSTTPAATNIPVITSTEASSSPTTAEGTSIPTSTYTEGSTPLTSTPASTMPVATSEMSTLSITPVDTSTLVTTSTEPSSLPTTAEATSMLTSTLSEGSTPLTNMPVSTILVASSEASTTSTIPVDSKTFVTTASEASSSPTTAEDTSIATSTPSEGSTPLTSMPVSTTPVASSEASNLSTTPVDSKTQVTTSTEASSSPPTAEVNSMPTSTPSEGSTPLTSMSVSTMPVASSEASTLSTTPVDTSTPVTTSSEASSSSTTPEGTSIPTSTPSEGSTPLTNMPVSTRLVVSSEASTTSTTPADSNTFVTTSSEASSSSTTAEGTSMPTSTYSERGTTITSMSVSTTLVASSEASTLSTTPVDSNTPVTTSTEATSSSTTAEGTSMPTSTYTEGSTPLTSMPVNTTLVASSEASTLSTTPVDTSTPVTTSTEASSSPTTADGASMPTSTPSEGSTPLTSMPVSKTLLTSSEASTLSTTPLDTSTHITTSTEASCSPTTTEGTSMPISTPSEGSPLLTSIPVSITPVTSPEASTLSTTPVDSNSPVTTSTEVSSSPTPAEGTSMPTSTYSEGRTPLTSMPVSTTLVATSAISTLSTTPVDTSTPVTNSTEARSSPTTSEGTSMPTSTPGEGSTPLTSMPDSTTPVVSSEARTLSATPVDTSTPVTTSTEATSSPTTAEGTSIPTSTPSEGTTPLTSTPVSHTLVANSEASTLSTTPVDSNTPLTTSTEASSPPPTAEGTSMPTSTPSEGSTPLTRMPVSTTMVASSETSTLSTTPADTSTPVTTYSQASSSSTTADGTSMPTSTYSEGSTPLTSVPVSTRLVVSSEASTLSTTPVDTSIPVTTSTEASSSPTTAEGTSIPTSPPSEGTTPLASMPVSTTLVVSSEANTLSTTPVDSKTQVATSTEASSPPPTAEVTSMPTSTPGERSTPLTSMPVRHTPVASSEASTLSTSPVDTSTPVTTSAETSSSPTTAEGTSLPTSTTSEGSTLLTSIPVSTTLVTSPEASTLLTTPVDTKGPVVTSNEVSSSPTPAEGTSMPTSTYSEGRTPLTSIPVNTTLVASSAISILSTTPVDNSTPVTTSTEACSSPTTSEGTSMPNSNPSEGTTPLTSIPVSTTPVVSSEASTLSATPVDTSTPGTTSAEATSSPTTAEGISIPTSTPSEGKTPLKSIPVSNTPVANSEASTLSTTPVDSNSPVVTSTAVSSSPTPAEGTSIAISTPSEGSTALTSIPVSTTTVASSEINSLSTTPAVTSTPVTTYSQASSSPTTADGTSMQTSTYSEGSTPLTSLPVSTMLVVSSEANTLSTTPIDSKTQVTASTEASSSTTAEGSSMTISTPSEGSPLLTSIPVSTTPVASPEASTLSTTPVDSNSPVITSTEVSSSPTPAEGTSMPTSTYTEGRTPLTSITVRTTPVASSAISTLSTTPVDNSTPVTTSTEARSSPTTSEGTSMPNSTPSEGTTPLTSIPVSTTPVLSSEASTLSATPIDTSTPVTTSTEATSSPTTAEGTSIPTSTLSEGMTPLTSTPVSHTLVANSEASTLSTTPVDSNSPVVTSTAVSSSPTPAEGTSIATSTPSEGSTALTSIPVSTTTVASSETNTLSTTPAVTSTPVTTYAQVSSSPTTADGSSMPTSTPREGRPPLTSIPVSTTTVASSEINTLSTTLADTRTPVTTYSQASSSPTTADGTSMPTPAYSEGSTPLTSMPLSTTLVVSSEASTLSTTPVDTSTPATTSTEGSSSPTTAGGTSIQTSTPSERTTPLAGMPVSTTLVVSSEGNTLSTTPVDSKTQVTNSTEASSSATAEGSSMTISAPSEGSPLLTSIPLSTTPVASPEASTLSTTPVDSNSPVITSTEVSSSPIPTEGTSMQTSTYSDRRTPLTSMPVSTTVVASSAISTLSTTPVDTSTPVTNSTEARSSPTTSEGTSMPTSTPSEGSTPFTSMPVSTMPVVTSEASTLSATPVDTSTPVTTSTEATSSPTTAEGTSIPTSTLSEGTTPLTSIPVSHTLVANSEVSTLSTTPVDSNTPFTTSTEASSPPPTAEGTSMPTSTSSEGNTPLTRMPVSTTMVASFETSTLSTTPADTSTPVTTYSQAGSSPTTADDTSMPTSTYSEGSTPLTSVPVSTMPVVSSEASTHSTTPVDTSTPVTTSTEASSSPTTAEGTSIPTSPPSEGTTPLASMPVSTTPVVSSEAGTLSTTPVDTSTPMTTSTEASSSPTTAEDIVVPISTASEGSTLLTSIPVSTTPVASPEASTLSTTPVDSNSPVVTSTEISSSATSAEGTSMPTSTYSEGSTPLRSMPVSTKPLASSEASTLSTTPVDTSIPVTTSTETSSSPTTAKDTSMPISTPSEVSTSLTSILVSTMPVASSEASTLSTTPVDTRTLVTTSTGTSSSPTTAEGSSMPTSTPGERSTPLTNILVSTTLLANSEASTLSTTPVDTSTPVTTSAEASSSPTTAEGTSMRISTPSDGSTPLTSILVSTLPVASSEASTVSTTAVDTSIPVTTSTEASSSPTTAEVTSMPTSTPSETSTPLTSMPVNHTPVASSEAGTLSTTPVDTSTPVTTSTKASSSPTTAEGIVVPISTASEGSTLLTSIPVSTTPVASSEASTLSTTPVDTSIPVTTSTEGSSSPTTAEGTSMPISTPSEVSTPLTSILVSTVPVAGSEASTLSTTPVDTRTPVTTSAEASSSPTTAEGTSMPISTPGERRTPLTSMSVSTMPVASSEASTLSRTPADTSTPVTTSTEASSSPTTAEGTGIPISTPSEGSTPLTSIPVSTTPVAIPEASTLSTTPVDSNSPVVTSTEVSSSPTPAEGTSMPISTYSEGSTPLTGVPVSTTPVTSSAISTLSTTPVDTSTPVTTSTEAHSSPTTSEGTSMPTSTPSEGSTPLTYMPVSTMLVVSSEDSTLSATPVDTSTPVTTSTEATSSTTAEGTSIPTSTPSEGMTPLTSVPVSNTPVASSEASILSTTPVDSNTPLTTSTEASSSPPTAEGTSMPTSTPSEGSTPLTSMPVSTTTVASSETSTLSTTPADTSTPVTTYSQASSSPPIADGTSMPTSTYSEGSTPLTNMSFSTTPVVSSEASTLSTTPVDTSTPVTTSTEASLSPTTAEGTSIPTSSPSEGTTPLASMPVSTTPVVSSEVNTLSTTPVDSNTLVTTSTEASSSPTIAEGTSLPTSTTSEGSTPLSIMPLSTTPVASSEASTLSTTPVDTSTPVTTSSPTNSSPTTAEVTSMPTSTAGEGSTPLTNMPVSTTPVASSEASTLSTTPVDSNTFVTSSSQASSSPATLQVTTMRMSTPSEGSSSLTTMLLSSTYVTSSEASTPSTPSVDRSTPVTTSTQSNSTPTPPEVITLPMSTPSEVSTPLTIMPVSTTSVTISEAGTASTLPVDTSTPVITSTQVSSSPVTPEGTTMPIWTPSEGSTPLTTMPVSTTRVTSSEGSTLSTPSVVTSTPVTTSTEAISSSATLDSTTMSVSMPMEISTLGTTILVSTTPVTRFPESSTPSIPSVYTSMSMTTASEGSSSPTTLEGTTTMPMSTTSERSTLLTTVLISPISVMSPSEASTLSTPPGDTSTPLLTSTKAGSFSIPAEVTTIRISITSERSTPLTTLLVSTTLPTSFPGASIASTPPLDTSTTFTPSTDTASTPTIPVATTISVSVITEGSTPGTTIFIPSTPVTSSTADVFPATTGAVSTPVITSTELNTPSTSSSSTTTSFSTTKEFTTPAMTTAAPLTYVTMSTAPSTPRTTSRGCTTSASTLSATSTPHTSTSVTTRPVTPSSESSRPSTITSHTIPPTFPPAHSSTPPTTSASSTTVNPEAVTTMTTRTKPSTRTTSFPTVTTTAVPTNTTIKSNPTSTPTVPRTTTCFGDGCQNTASRCKNGGTWDGLKCQCPNLYYGELCEEVVSSIDIGPPETISAQMELTVTVTSVKFTEELKNHSSQEFQEFKQTFTEQMNIVYSGIPEYVGVNITKLRLGSVVVEHDVLLRTKYTPEYKTVLDNATEVVKEKITKVTTQQIMINDICSDMMCFNTTGTQVQNITVTQYDPEEDCRKMAKEYGDYFVVEYRDQKPYCISPCEPGFSVSKNCNLGKCQMSLSGPQCLCVTTETHWYSGETCNQGTQKSLVYG

SEQ ID NO: 2750 - protein, 479 aa, synthetic construct
  REGION 1..479: note = MUC21 (Q5SSG8) SP+PP+ECD
MKMQKGNVLLMFGLLLHLEAATNSNETSTSANTGSSVISSGASTATNSGSSVTSSGVSTATISGSSVTSNGVSIVTNSEFHTTSSGISTATNSEFSTVSSGISIATNSESSTTSSGASTATNSESSTPSSGASTATNSDSSTTSSGASTATNSDSSTTSSEASTATNSESSTTSSGASTATNSESSTVSSRASTATNSESSTTSSGASTATNSESRTTSNGAGTATNSESSTTSSGASTATNSESSTPSSGAGTATNSESSTTSSGAGTATNSESSTVSSGISTVTNSESSTPSSGANTATNSESSTTSSGANTATNSDSSTTSSGASTATNSESSTTSSGASTATNSESSTTSSGASTATNSGSSTTSSGTSTATNSESSTVSSGASTATTSESSTTSSGASTATNSESSTVSSGASTATNSESSTTSSGANTATNSGSSVTSAGSGTAALTGMHTTSHSASTAVSEAKPGGSLVPWE

SEQ ID NO: 2751 - protein, 1660 aa, synthetic construct
  REGION 1..1660: note = MUC22 (E2RYF6) SP+PP+ECD
MRRGNISPAFWFLWLLLFGLLGPSSENTTAFTKGSDTTTASITGSETTMASTMASTSALTTGSKITTDSTTGSETTSASTMASTAAFTTGSETNTASTTDSGTTIASTRTFTTGSDTTTGSTAGSETIVASTTVSGTTTTFTIASTTVPETTMASSTTSTAGSEKTMASSIISETTMASTTGSETATVSTTGSETTTTSTASSEATKVSTTGSETTTASTAGSETTTTSTSMAGSEATTTSTADSKVITASSMSSETTVAPAAGSNTTTASTTGSETTTILIKASETTTASTAGSETTTPSPTGSQTTIVSISGSEITTTSTAGSENTTVSSAGSGTTTASMAGSETTVSTAGSETTTVSITGTETTMVSAMGSETTTNSTTSSETTVTSTAGSETTTVSTVGSETTTAYTADSETTAASTTGSEMTTVFTAGSETITPSTAGSETTTVSTAGSETTTVSTTGSETTTASTAHSETTAASTMGSETTKVSTAGSETTVSTAGSETTAASTEDSETNTAFTEDSKTTTASTTGFETTAASTTGSEPTMASTMGSETTMASTIGPETTKVSTASSEVTTVFAAGSETIRASTVGSETTTVSTTGSETTTASIMGSETSTDSTTGSETTTASTEGSETTTASTEGSEATTVSTTGSETTTVSITDSETTTTCTEGSEMTAVSTTVFETTTASTEGSEITIASTSDSETTTASTEGSETTTVTTAGSETKTAYTTGSETTTASNTGLETTTVFTIGSDTTTASTEGSETTAVSATGSEMTTVSTEGSENTTVSTTGSETTTVSTTGLETTTTSTEGSEMTTVSTTGAETTTDSTEGSGTTAASTAGSETTTVSTADSENTTASTADSETTSASTTGSETTTASTTSSETTTASTEGSETTTVSTTDSETTMVSTTGSERTITSTEGSETTTVSATGSETTVSTEGSGTTTVSITGSETTKVSTTGSETTTTSTEGSEITTASITGSETTTASTEGSETTTASTEGSETTSASTTGSETTTASTTSSETTMASIMGSETTMASTIGSETTKVSTASSKMTTVFTENSETTIASTTASETTTVSTAGSETIPASTAGSETTTTTSTEGSETTTASTEGSETTTASTESSETTTATTIGSETTTASTEGSETTTTSTEGSETTTASTEGSEITTVSTTGSETTTASTEGSETTTASTEGSELTTVSTTGSETITVSAEGSETTTVTTMGSETTTASTAGSETTTVSTAGSETTTASIEGSETTTVSSTGSETTTVSTTGTETTITSTEGSETTTVTTAGSETTAVYTTGSETTTTSTEGSETTTVSTTGSETTTASTADLETTTVSTSGSGTTTASTAGSETTTVYITGSKTTTASTEGSEATTVSTTSSETTTASTTGSEMTTVFTTVSETTTVSTIGSEATTSSAAGSEATTTSTEGSETTTASTAGSETTTASTAGSETTTASTSGSETNTACTTGSETSTPSSAGSETNTAFIIGSESTIASTASLEPTATSLTGSETTTVSITASGATAASTTVSSTTFVLTKATDVSIQPITNTPMSGTRTTGTRLTASSSVTMAPGMDFTASAASHTVPGIVLNTSGLGTSTMGASSTTSAHGVRTTTGSTREPTSSTFQETGPVSMGTNTVSMSHTPTNVIKPSGYLQP

SEQ ID NO: 2752 - protein, 3226 aa, synthetic construct
  REGION 1..3226: note = MUC3A (Q02505) SP+PP+ECD
MQLLGLLGLLWMLKASPWATGTLSTATSISQVPFPRAEAASAVLSNSPHSRDLAGWPLGVPQLASPAPGHRENAPMTLTTSPHDTLISETLLNSPVSSNTSTTPTSKFAFKVETTPPTVLVYSATTECVYPTSFIITISHPTSICVTTTQVAFTSSYTSTPVTQKPVTTVTSTYSMTTTEKGTSAMTSSPSTTTARETPIVTVTPSSVSATDTTFHTTISSTTRTTERTPLPTGSIHTTTSPTPVFTTLKTAVTSTSPITSSITSTNTVTSMTTTASQPTATNTLSSPTRTILSSTPVLSTETITSGITNTTPLSTLVTTLPTTISRSTPTSETTYTTSPTSTVTDSTTKIAYSTSMTGTLSTETSLPPTSSSLPTTETATTPMTNLVTTTTEISSHSTPSFSSSTIYSTVSTSTTAISSLPPTSGTMVTSTTMTPSSLSTDIPFTTPTTITHHSVGSTGFLTTATDLTSTFTVSSSSAMSTSVIPSSPSIQNTETSSLVSMTSATTPNVRPTFVSTLSTPTSSLLTTFPATYSFSSSMSASSAGTTHTESISSPPASTSTLHTTAESTLAPTTTTSFTTSTTMEPPSTTAATTGTGQTTFTSSTATFPETTTPTPTTDMSTESLTTAMTSPPITSSVTSTNTVTSMTTTTSPPTTTNSFTSLTSMPLSSTPVPSTEVVTSGTINTIPPSILVTTLPTPNASSMTTSETTYPNSPTGPGTNSTTEITYPTTMTETSSTATSLPPTSPLVSTAKTAKTPTTNLVTTTTKTTSHSTTSFTSSTVYSTASTYTTAITSVPTTLGTMVTSTSMISSTVSTGIPTSQPTTITPSSVGISGSLPMMTDLTSVYTVSNMSARPTTVIPSSPTVQNTEISISVSMTSATTPSGGPTFTSTENTPTRSLLTSFPMTHSFSSSMSESSAGTTHTESISSPRGTTSTLHTTVESTPSPTTTTSFTTSTMMEPPSSTVSTTGRGQTTFPSSTATFPETTTLTPTTDISTVSLTTAMTSPPPVSSSITPTNTMTSMRTTTYWPTATNTLSPLTSSILSSTPVPSTEMITSHTTNTTPLSTLVTTLLTTITRSTPTSETTYPTSPTSIVSDSTTEITYSTSITGTLSTATTLPPTSSSLPTTETATMTPTTTLITTTPNTTSLSTPSFTSSTIYSTVSTSTTAISSASPTSGTMVTSTTMTPSSLSTDTPSTTPTTITYPSVGSTGFLTTATDLTSTFTVSSSSAMSTSVIPSSPSIQNTETSSLVSMTSATTPSLRPTITSTDSTLTSSLLTTFPSTYSFSSSMSASSAGTTHTETISSLPASTNTIHTTAESALAPTTTTSFTTSPTMEPPSTTVATTGTGQTTFPSSTATFLETTTLTPTTDFSTESLTTAMTSTPPITSSITPTDTMTSMRTTTSWPTATNTLSPLTSSILSSTPVPSTEVTTSHTTNTNPVSTLVTTLPITITRSTLTSETAYPSSPTSTVTESTTEITYPTTMTETSSTATSLPPTSSLVSTAETAKTPTTNLVTTTTKTTSHSTTSFTSSTIYSTASTPTTAITSVPTTLGTMVTSTSMIPSTVSTGIPTSQPTTITPSSVGISGSLPMMTDLTSVYTVSSMSARPTSVIPSSPTVQNTETSIFVSMMSATTPSGGPTFTSTENTPTRSLLTSFPVTHSFSSSMSASSVGTTHTQSISSPPAITSTLHTTAESTPSPTTTMSFTTFTKMETPSSTVATTGTGQTTFTSSTATSPKTTTLTPTSDISTGSFKTAVSSTPPITSSITSTYTVTSMTTTTPLGPTATNTLPSFTSSVSSSTPVPSTEAITSGTTNTTPLSTLVTTFSNSDTSSTPTSETTYPTSLTSALTDSTTRTTYSTNMTGTLSTVTSLRPTSSSLLTTVTATVPTTNLVTTTTKITSHSTPSFTSSIATTETPSHSTPRFTSSITTTETPSHSTPRFTSSITNTKTTSHSSPSFTSSITTTETTSHNTPSLTSSITTTKTTSHSTPSYTSLITTTTTTSHSTPSFTSSITTTETTSHNTPSLTSSITTTETTSHSTPSFTSSITTETTSHSTPSFTSLITITEITSHSTLSYTTSITTTETPSHSTLSFTSSITTTETTSHSTPSFTSSITTSEMPSHSTPSFTSSITTTENATHSTPNFTSSITTTETTSHSTPSFTSLITTTETTSHRWGTTETTSYSTPSFTSSNTITETTSHSTPSYITSITTTETPSSSTPSFSSSITTTETTSHSTPGFTSSITTTETTSHSTPSFTSSITTTETTSHDTPSFTSSITTSETPSHSTPSSTSLITTTKTTSHSTPSFTSSITTTETTSHSAHSFTSSITTTETTSHNTRSFTSSITTTETNSHSTTSFTSSITTTETTSHSTPSFSSSITTTETPLHSTPGLTSWVTTTKTTSHITPGLTSSITTTETTSHSTPGFTSSITTTETTSESTPSLSSSTIYSTVSTSTTAITSHFTTSETAVTPTPVTPSSLSTDIPTTSLRTLTPSSVGTSTSLTTTTDFPSIPTDISTLPTRTHIISSSPSIQSTETSSLVGTTSPTMSTVRMTLRITENTPISSFSTSIVVIPETPTQTPPVLTSATGTQTSPAPTTVTFGSTDSSTSTLHTLTPSTALSTIVSTSQVPIPSTHSSTLQTTPSTPSLQTSLTSTSEFTTESFTRGSTSTNAILTSFSTIIWSSTPTIIMSSSPSSASITPVFSTTIHSVPSSPYIFSTENVGSASITGFPSLSSSATTSTSSTSSSLTTALTEITPFSYISLPSTTPCPGTITITIVPASPTDPCVEMDPSTEATSPPTTPLTVFPFTTEMVTCPTSISIQTTLTTYMDTSSMMPESESSISPNASSSTGTGTVPTNTVFTSTRLPTSETWLSNSSVIPLPLPGVSTIPLTMKPSSSLPTILRTSSKSTHPSPPTTRTSETPVATTQTPTTLTSRRTTRITSQMTTQSTLTTTAGTCDNGGTWEQGQCACLPGFSGDRCQLQTRCQNGGQWDGLKCQCPSTFYGSSCEFAVEQVDLDVVETEVGMEVSVDQQFSPDLNDNTSQAYRDFNKTFWNQMQKIFADMQGFTFKGVEILSLRNGSIVVDYLVLLEMPFSPQLESEYEQVKTTLKEGLQNASQDVNSCQDSQTLCFKPDSIKVNNNSKTELTPAAICRRAAPTGYEEFYFPLVEATRLRCVTKCTSGVDNAIDCHQGQCVLETSGPTCRCYSTDTHWFSGPRCEVAVHWRA

SEQ ID NO: 2753 - protein, 1140 aa, synthetic construct
  REGION 1..1140: note = MUC3B (Q9H195) SP+PP+ECD
MQLLGLLSILWMLKSSPGATGTLSTATSTSHVTFPRAEATRTALSNSPHSRYLAEWPQGVPQLASPAPGHRENAPMTLTTSPHDTLISETLLSSLVSSNTSTTPTSKFAFKVETTPPTVLVYSATTECVYPTSFIITISHSTSICVTTTQVTFTSSYTPTPVTQKPVTTVTRTYPMTTTEKGTSAMISSPSTTTARETPIVTVTPSSSVSATDTTFHTTISSTTRTTERTPLPTGSIHTTMSPTPVFTTLKTAVTSTSPITSTITSTNTVTSMTTTTSRPTATNTLSSLTSSILSSTPAPNTEVITSHTTTTTPPSTLVTTLPTAIARSTPTSETTPSFMSSIITTETTSHSTPSFSSSTIHSTVSSSTTAITSPFTTAETGVTSTPSSPSSLSTDIPTTSLRTLTPLSLSTSTSLTTTTDLPSIPTDISSLPTPIHIISSSPSIQSTETSSLVGTTSPTMSTVRATLRSTENTPISSFSTSIVVTPETPTTQAPPVLMSATGTQTSPVPTTVTFGSMDSSTSTLHTLTPSTALSKIMSTSQFPIPSTHSSTLQTTPSIPSLQTSLTSTSEFTTESFTRGSTSTNAILTSFSTIIWSSTPTIIMSSSPSSASITPVFATTIHSVPSSPYIFSTENVGSASITAFPSLSSSSTTSTSPTSSSLTTALTEITPFSYISLPSTTPCPGTITITIVPASPTDPCVEMDPSTEATSPPTTPLTVFPFTTEMVTCPSSISMQTTLATHMDTSSMTPESESSIIPNASSSTGTGTVPTNTVFTSTRLPTSETWLSNNSVIPTPLPGVSTIPLTMKPSSSLPTILRTSSKSTHPSPPTARTSQTSVATTQTPTTLTTCRTTPITSWMTTQSTLTTTAGTCDNGGTWEQGQCACLPGFSGDRCQLQTRCQNGGQWDGLKCQCPSTFYGSSCEFAVEQVDLDVVETEVGMEVSVDQQFSPDLNDNTSQAYRDFNKTFWNQMQKIFADMQGFTFKGVEILSLRNGSIVVDYLVLLEMPFSPQLESEYEQVKTTLKEGLQNASQDANSCQDSQALCFKPDSIKVNNNSKTELTPEAICRRAAPTGYEEFYFPLVEATRLRCVTKCTSGLDNAIDCHQGQCVLETSGPACRCYSTDTHWFSGPRCEVTVHWRA

SEQ ID NO: 2754 - protein, 2125 aa, synthetic construct
  REGION 1..2125: note = MUC4 (Q99102) SP+PP+ECD
MKGARWRRVPWVSLSCLCLCLLPHVVPGTTEDTLITGSKTAAPVTSTGSTTATLEGQSTAASSRTSNQDISASSQNHQTKSTETTSKAQTDTLTQMMTSTLFSSPSVHNVMETVTQETAPPDEMTTSFPSSVTNTLMMTSKTITMTTSTDSTLGNTEETSTAGTESSTPVTSAVSITAGQEGQSRTTSWRTSIQDTSASSQNHWTRSTQTTRESQTSTLTHRTTSTPSFSPSVHNVTGTVSQKTSPSGETATSSLCSVTNTSMMTSEKITVTTSTGSTLGNPGETSSVPVTGSLMPVTSAALVTVDPEGQSPATFSRTSTQDTTAFSKNHQTQSVETTRVSQINTLNTLTPVTTSTVLSSPSGFNPSGTVSQETFPSGETTISSPSSVSNTFLVTSKVFRMPISRDSTLGNTEETSLSVSGTISAITSKVSTIWWSDTLSTALSPSSLPPKISTAFHTQQSEGAETTGRPHERSSFSPGVSQEIFTLHETTTWPSSFSSKGHTTWSQTELPSTSTGAATRLVTGNPSTRAAGTIPRVPSKVSAIGEPGEPTTYSSHSTTLPKTTGAGAQTQWTQETGTTGEALLSSPSYSVIQMIKTATSPSSSPMLDRHTSQQITTAPSTNHSTIHSTSTSPQESPAVSQRGHTRAPQTTQESQTTRSVSPMTDTKTVTTPGSSFTASGHSPSEIVPQDAPTISAATTFAPAPTGNGHTTQAPTTALQAAPSSHDATLGPSGGTSLSKTGALTLANSVVSTPGGPEGQWTSASASTSPDTAAAMTHTHQAESTEASGQTQTSEPASSGSRTTSAGTATPSSSGASGTTPSGSEGISTSGETTRFSSNPSRDSHTTQSTTELLSASASHGAIPVSTGMASSIVPGTFHPTLSEASTAGRPTGQSSPTSPSASPQETAAISRMAQTQRTGTSRGSDTISLASQATDTFSTVPPTPPSITSSGLTSPQTQTHTLSPSGSGKTFTTALISNATPLPVTSTSSASTGHATPLAVSSATSASTVSSDSPLKMETSGMTTPSLKTDGGRRTATSPPPTTSQTIISTIPSTAMHTRSTAAPIPILPERGVSLFPYGAGAGDLEFVRRTVDFTSPLFKPATGFPLGSSLRDSLYFTDNGQIIFPESDYQIFSYPNPLPTGFTGRDPVALVAPFWDDADFSTGRGTTFYQEYETFYGEHSLLVQQAESWIRKMTNNGGYKARWALKVTWVNAHAYPAQWTLGSNTYQAILSTDGSRSYALFLYQSGGMQWDVAQRSGNPVLMGFSSGDGYFENSPLMSQPVWERYRPDRFLNSNSGLQGLQFYRLHREERPNYRLECLQWLKSQPRWPSWGWNQVSCPCSWQQGRRDLRFQPVSIGRWGLGSRQLCSFTSWRGGVCCSYGPWGEFREGWHVQRPWQLAQELEPQSWCCRWNDKPYLCALYQQRRPHVGCATYRPPQPAWMFGDPHITTLDGVSYTFNGLGDFLLVGAQDGNSSFLLQGRTAQTGSAQATNFIAFAAQYRSSSLGPVTVQWLLEPHDAIRVLLDNQTVTFQPDHEDGGGQETFNATGVLLSRNGSEVSASFDGWATVSVIALSNILHASASLPPEYQNRTEGLLGVWNNNPEDDFRMPNGSTIPPGSPEEMLFHFGMTWQINGTGLLGKRNDQLPSNFTPVFYSQLQKNSSWAEHLISNCDGDSSCIYDTLALRNASIGLHTREVSKNYEQANATLNQYPPSINGGRVIEAYKGQTTLIQYTSNAEDANFTLRDSCTDLELFENGTLLWTPKSLEPFTLEILARSAKIGLASALQPRTVVCHCNAESQCLYNQTSRVGNSSLEVAGCKCDGGTFGRYCEGSEDACEEPCFPSVHCVPGKGCEACPPNLTGDGRHCAALGSSFLCQNQSCPVNYCYNQGHCYISQTLGCQPMCTCPPAFTDSRCFLAGNNFSPTVNLELPLRVIQLLLSEEENASMAEVNASVAYRLGTLDMRAFLRNSQVERIDSAAPASGSPIQHWMVISEFQYRPRGPVIDFLNNQLLAAVVEAFLYHVPRRSEEPRNDVVFQPISGEDVRDVTALNVSTLKAYFRCDGYKGYDLVYSPQSGFTCVSPCSRGYCDHGGQCQHLPSGPRCSCVSFSIYTAWGEHCEHLSMKLDA

SEQ ID NO: 2755 - protein, 495 aa, synthetic construct
  REGION 1..495: note = MUSK (O15146) SP+PP+ECD
MRELVNIPLVHILTLVAFSGTEKLPKAPVITTPLETVDALVEEVATFMCAVESYPQPEISWTRNKILIKLFDTRYSIRENGQLLTILSVEDSDDGIYCCTANNGVGGAVESCGALQVKMKPKITRPPINVKIIEGLKAVLPCTTMGNPKPSVSWIKGDSPLRENSRIAVLESGSLRIHNVQKEDAGQYRCVAKNSLGTAYSKVVKLEVEVFARILRAPESHNVTFGSFVTLHCTATGIPVPTITWIENGNAVSSGSIQESVKDRVIDSRLQLFITKPGLYTCIATNKHGEKFSTAKAAATISIAEWSKPQKDNKGYCAQYRGEVCNAVLAKDALVFLNTSYADPEEAQELLVHTAWNELKVVSPVCRPAAEALLCNHIFQECSPGVVPTPIPICREYCLAVKELFCAKEWLVMEEKTHRGLYRSEMHLLSVPECSKLPSMHWDPTACARLPHLDYNKENLKTFPPMTSSKPSVDIPNLPSSSSSSFSVSPTYSMT

SEQ ID NO: 2756 - protein, 341 aa, synthetic construct
  REGION 1..341: note = MXRA8 (Q9BRK3) SP+PP+ECD
MALPSRILLWKLVLLQSSAVLLHSGSSVPAAAGSSVVSESAVSWEAGARAVLRCQSPRMVWTQDRLHDRQRVLHWDLRGPGGGPARRLLDLYSAGEQRVYEARDRGRLELSASAFDDGNFSLLIRAVEETDAGLYTCNLHHHYCHLYESLAVRLEVTDGPPATPAYWDGEKEVLAVARGAPALLTCVNRGHVWTDRHVEEAQQVVHWDRQPPGVPHDRADRLLDLYASGERRAYGPLFLRDRVAVGADAFERGDFSLRIEPLEVADEGTYSCHLHHHYCGLHERRVFHLTVAEPHAEPPPRGSPGNGSSHSGAPGPDPTLARGHNVINVIVPESRAHFFQQ

SEQ ID NO: 2757 - protein, 448 aa, synthetic construct
  REGION 1..448: note = NAGPA (Q9UK23) SP+PP+ECD
MATSTGRWLLLRLALFGFLWEASGGLDSGASRDDDLLLPYPRARARLPRDCTRVRAGNREHESWPPPPATPGAGGLAVRTFVSHFRDRAVAGHLTRAVEPLRTFSVLEPGGPGGCAARRRATVEETARAADCRVAQNGGFFRMNSGECLGNVVSDERRVSSSGGLQNAQFGIRRDGTLVTGYLSEEEVLDTENPFVQLLSGVVWLIRNGSIYINESQATECDETQETGSFSKFVNVISARTAIGHDRKGQLVLFHADGQTEQRGINLWEMAEFLLKQDVVNAINLDGGGSATFVLNGTLASYPSDHCQDNMWRCPRQVSTVVCVHEPRCQPPDCHGHGTCVDGHCQCTGHFWRGPGCDELDCGPSNCSQHGLCTETGCRCDAGWTGSNCSEECPLGWHGPGCQRPCKCEHHCPCDPKTGNCSVSRVKQCLQPPEATLRAGELSFFTRT

SEQ ID NO: 2758 - protein, 718 aa, synthetic construct
  REGION 1..718: note = NCAM1 (P13591) SP+PP+ECD
MLQTKDLIWTLFFLGTAVSLQVDIVPSQGEISVGESKFFLCQVAGDAKDKDISWFSPNGEKLTPNQQRISVVWNDDSSSTLTIYNANIDDAGIYKCVVTGEDGSESEATVNVKIFQKLMFKNAPTPQEFREGEDAVIVCDVVSSLPPTIIWKHKGRDVILKKDVRFIVLSNNYLQIRGIKKTDEGTYRCEGRILARGEINFKDIQVIVNVPPTIQARQNIVNATANLGQSVTLVCDAEGFPEPTMSWTKDGEQIEQEEDDEKYIFSDDSSQLTIKKVDKNDEAEYICIAENKAGEQDATIHLKVFAKPKITYVENQTAMELEEQVTLTCEASGDPIPSITWRTSTRNISSEEKASWTRPEKQETLDGHMVVRSHARVSSLTLKSIQYTDAGEYICTASNTIGQDSQSMYLEVQYAPKLQGPVAVYTWEGNQVNITCEVFAYPSATISWFRDGQLLPSSNYSNIKIYNTPSASYLEVTPDSENDFGNYNCTAVNRIGQESLEFILVQADTPSSPSIDQVEPYSSTAQVQFDEPEATGGVPILKYKAEWRAVGEEVWHSKWYDAKEASMEGIVTIVGLKPETTYAVRLAALNGKGLGEISAASEFKTQPVQGEPSAPKLEGQMGEDGNSIKVNLIKQDDGGSPIRHYLVRYRALSSEWKPEIRLPSGSDHVMLKSLDWNAEYEVYVVAENQQGKSKAAHFVFRTSAQPTAIPANGSPTSG

SEQ ID NO: 2759 - protein, 697 aa, synthetic construct
  REGION 1..697: note = NCAM2 (O15394) SP+PP+ECD
MSLLLSFYLLGLLVSSGQALLQVTISLSKVELSVGESKFFTCTAIGEPESIDWYNPQGEKIISTQRVVVQKEGVRSRLTIYNANIEDAGIYRCQATDAKGQTQEATVVLEIYQKLTFREVVSPQEFKQGEDAEVVCRVSSSPAPAVSWLYHNEEVTTISDNRFAMLANNNLQILNINKSDEGIYRCEGRVEARGEIDFRDIIVIVNVPPAISMPQKSFNATAERGEEMTFSCRASGSPEPAISWFRNGKLIEENEKYILKGSNTELTVRNIINSDGGPYVCRATNKAGEDEKQAFLQVFVQPHIIQLKNETTYENGQVTLVCDAEGEPIPEITWKRAVDGFTFTEGDKSLDGRIEVKGQHGSSSLHIKDVKLSDSGRYDCEAASRIGGHQKSMYLDIEYAPKFISNQTIYYSWEGNPINISCDVKSNPPASIHWRRDKLVLPAKNTTNLKTYSTGRKMILEIAPTSDNDFGRYNCTATNHIGTRFQEYILALADVPSSPYGVKIIELSQTTAKVSFNKPDSHGGVPIHHYQVDVKEVASEIWKIVRSHGVQTMVVLNNLEPNTTYEIRVAAVNGKGQGDYSKIEIFQTLPVREPSPPSIHGQPSSGKSFKLSITKQDDGGAPILEYIVKYRSKDKEDQWLEKKVQGNKDHIILEHLQWTMGYEVQITAANRLGYSEPTVYEFSMPPKPNIIKDTLFN

SEQ ID NO: 2760 - protein, 258 aa, synthetic construct
  REGION 1..258: note = NCR1 (O76036) SP+PP+ECD
MSSTLPALLCVGLCLSQRISAQQQTLPKPFIWAEPHFMVPKEKQVTICCQGNYGAVEYQLHFEGSLFAVDRPKPPERINKVKFYIPDMNSRMAGQYSCIYRVGELWSEPSNLLDLVVTEMYDTPTLSVHPGPEVISGEKVTFYCRLDTATSMFLLLKEGRSSHVQRGYGKVQAEFPLGPVTTAHRGTYRCFGSYNNHAWSFPSEPVKLLVTGDIENTSLAPEDPTFPADTWGTYLLTTETGLQKDHALWDHTAQNLLR

SEQ ID NO: 2761 - protein, 192 aa, synthetic construct
  REGION 1..192: note = NCR2 (O95944) SP+PP+ECD
MAWRALHPLLLLLLLFPGSQAQSKAQVLQSVAGQTLTVRCQYPPTGSLYEKKGWCKEASALVCIRLVTSSKPRTMAWTSRFTIWDDPDAGFFTVTMTDLREEDSGHYWCRIYRPSDNSVSKSVRFYLVVSPASASTQTSWTPRDLVSSQTQTQSCVPPTAGARQAPESPSTIPVPSQPQNSTLRPGPAAPIA

SEQ ID NO: 2762 - protein, 135 aa, synthetic construct
  REGION 1..135: note = NCR3 (O14931) SP+PP+ECD
MAWMLLLILIMVHPGSCALWVSQPPEIRTLEGSSAFLPCSFNASQGRLAIGSVTWFRDEVVPGKEVRNGTPEFRGRLAPLASSRFLHDHQAELHIRDVRGHDASIYVCRVEVLGLGVGTGNGTRLVVEKEHPQLG

SEQ ID NO: 2763 - protein, 262 aa, synthetic construct
  REGION 1..262: note = NCR3LG1 (Q68D85) SP+PP+ECD
MTWRAAASTCAALLILLWALTTEGDLKVEMMAGGTQITPLNDNVTIFCNIFYSQPLNITSMGITWFWKSLTFDKEVKVFEFFGDHQEAFRPGAIVSPWRLKSGDASLRLPGIQLEEAGEYRCEVVVTPLKAQGTVQLEVVASPASRLLLDQVGMKENEDKYMCESSGFYPEAINITWEKQTQKFPHPIEISEDVITGPTIKNMDGTFNVTSCLKLNSSQEDPGTVYQCVVRHASLHTPLRSNFTLTAARHSLSETEKTDNFS

SEQ ID NO: 2764 - protein, 669 aa, synthetic construct
  REGION 1..669: note = NCSTN (Q92542) SP+PP+ECD
MATAGGGSGADPGSRGLLRLLSFCVLLAGLCRGNSVERKIYIPLNKTAPCVRLLNATHQIGCQSSISGDTGVIHVVEKEEDLQWVLTDGPNPPYMVLLESKHFTRDLMEKLKGRTSRIAGLAVSLTKPSPASGFSPSVQCPNDGFGVYSNSYGPEFAHCREIQWNSLGNGLAYEDFSFPIFLLEDENETKVIKQCYQDHNLSQNGSAPTFPLCAMQLFSHMHAVISTATCMRRSSIQSTFSINPEIVCDPLSDYNVWSMLKPINTTGTLKPDDRVVVAATRLDSRSFFWNVAPGAESAVASFVTQLAAAEALQKAPDVTTLPRNVMFVFFQGETFDYIGSSRMVYDMEKGKFPVQLENVDSFVELGQVALRTSLELWMHTDPVSQKNESVRNQVEDLLATLEKSGAGVPAVILRRPNQSQPLPPSSLQRFLRARNISGVVLADHSGAFHNKYYQSIYDTAENINVSYPEWLSPEEDLNFVTDTAKALADVATVLGRALYELAGGTNFSDTVQADPQTVTRLLYGFLIKANNSWFQSILRQDLRSYLGDGPLQHYIAVSSPTNTTYVVQYALANLTGTVVNLTREQCQDPSKVPSENKDLYEYSWVQGPLHSNETDRLPRCVRSTARLARALSPAFELSQWSSTEYSTWTESRWKDIRARIFLIASKELE

SEQ ID NO: 2765 - protein, 1105 aa, synthetic construct
  REGION 1..1105: note = NEO1 (Q92859) SP+PP+ECD
MAAERGARRLLSTPSFWLYCLLLLGRRAPGAAAARSGSAPQSPGASIRTFTPFYFLVEPVDTLSVRGSSVILNCSAYSEPSPKIEWKKDGTFLNLVSDDRRQLLPDGSLFISNVVHSKHNKPDEGYYQCVATVESLGTIISRTAKLIVAGLPRFTSQPEPSSVYAGNNAILNCEVNADLVPFVRWEQNRQPLLLDDRVIKLPSGMLVISNATEGDGGLYRCVVESGGPPKYSDEVELKVLPDPEVISDLVFLKQPSPLVRVIGQDVVLPCVASGLPTPTIKWMKNEEALDTESSERLVLLAGGSLEISDVTEDDAGTYFCIADNGNETIEAQAELTVQAQPEFLKQPTNIYAHESMDIVFECEVTGKPTPTVKWVKNGDMVIPSDYFKIVKEHNLQVLGLVKSDEGFYQCIAENDVGNAQAGAQLIILEHAPATTGPLPSAPRDVVASLVSTRFIKLTWRTPASDPHGDNLTYSVFYTKEGIARERVENTSHPGEMQVTIQNLMPATVYIFRVMAQNKHGSGESSAPLRVETQPEVQLPGPAPNLRAYAASPTSITVTWETPVSGNGEIQNYKLYYMEKGTDKEQDVDVSSHSYTINGLKKYTEYSFRVVAYNKHGPGVSTPDVAVRTLSDVPSAAPQNLSLEVRNSKSIMIHWQPPAPATQNGQITGYKIRYRKASRKSDVTETLVSGTQLSQLIEGLDRGTEYNFRVAALTINGTGPATDWLSAETFESDLDETRVPEVPSSLHVRPLVTSIVVSWTPPENQNIVVRGYAIGYGIGSPHAQTIKVDYKQRYYTIENLDPSSHYVITLKAFNNVGEGIPLYESAVTRPHTDTSEVDLFVINAPYTPVPDPTPMMPPVGVQASILSHDTIRITWADNSLPKHQKITDSRYYTVRWKTNIPANTKYKNANATTLSYLVTGLKPNTLYEFSVMVTKGRRSSTWSMTAHGTTFELVPTSPPKDVTVVSKEGKPKTIIVNWQPPSEANGKITGYIIYYSTDVNAEIHDWVIEPVVGNRLTHQIQELTLDTPYYFKIQARNSKGMGPMSEAVQFRTPKADSSDKMPNDQASGSGGKGSRLPDLGSDYKPPMSGSNSPHGSPTSPLDSNML

SEQ ID NO: 2766 - protein, 344 aa, synthetic construct
  REGION 1..344: note = NETO1 (Q8TDF5) SP+PP+ECD
MIHGRSVLHIVASLIILHLSGATKKGTEKQTTSETQKSVQCGTWTKHAEGGIFTSPNYPSKYPPDRECIYIIEAAPRQCIELYFDEKYSIEPSWECKFDHIEVRDGPFGFSPIIGRFCGQQNPPVIKSSGRFLWIKFFADGELESMGFSARYNFTPDPDFKDLGALKPLPACEFEMGGSEGIVESIQIMKEGKATASEAVDCKWYIRAPPRSKIYLRFLDYEMQNSNECKRNFVAVYDGSSSVEDLKAKFCSTVANDVMLRTGLGVIRMWADEGSRNSRFQMLFTSFQEPPCEGNTFFCHSNMCINNTLVCNGLQNCVYPWDENHCKEKRKTSLLDQLTNTSGT

SEQ ID NO: 2767 - protein, 347 aa, synthetic construct
  REGION 1..347: note = NETO2 (Q8NC67) SP+PP+ECD
MALERLCSVLKVLLITVLVVEGIAVAQKTQDGQNIGIKHIPATQCGIWVRTSNGGHFASPNYPDSYPPNKECIYILEAAPRQRIELTFDEHYYIEPSFECRFDHLEVRDGPFGFSPLIDRYCGVKSPPLIRSTGRFMWIKFSSDEELEGLGFRAKYSFIPDPDFTYLGGILNPIPDCQFELSGADGIVRSSQVEQEEKTKPGQAVDCIWTIKATPKAKIYLRFLDYQMEHSNECKRNFVAVYDGSSSIENLKAKFCSTVANDVMLKTGIGVIRMWADEGSRLSRFRMLFTSFVEPPCTSSTFFCHSNMCINNSLVCNGVQNCAYPWDENHCKEKKKAGVFEQITKTH

SEQ ID NO: 2768 - protein, 163 aa, synthetic construct
  REGION 1..163: note = NFAM1 (Q8NET5) SP+PP+ECD
MENQPVRWRALPGLPRPPGLPAAPWLLLGVLLLPGTLRLAGGQSVTHTGLPIMASLANTAISFSCRITYPYTPQFKVFTVSYFHEDLQGQRSPKKPTNCHPGLGTENQSHTLDCQVTLVLPGASATGTYYCSVHWPHSTVRGSGTFILVRDAGYREPPQSPQK

SEQ ID NO: 2769 - protein, 1217 aa, synthetic construct
  REGION 1..1217: note = NFASC (O94856) SP+PP+ECD
MARQPPPPWVHAAFLLCLLSLGGAIEIPMDPSIQNELTQPPTITKQSAKDHIVDPRDNILIECEAKGNPAPSFHWTRNSRFFNIAKDPRVSMRRRSGTLVIDFRSGGRPEEYEGEYQCFARNKFGTALSNRIRLQVSKSPLWPKENLDPVVVQEGAPLTLQCNPPPGLPSPVIFWMSSSMEPITQDKRVSQGHNGDLYFSNVMLQDMQTDYSCNARFHFTHTIQQKNPFTLKVLTTRGVAERTPSFMYPQGTASSQMVLRGMDLLLECIASGVPTPDIAWYKKGGDLPSDKAKFENFNKALRITNVSEEDSGEYFCLASNKMGSIRHTISVRVKAAPYWLDEPKNLILAPGEDGRLVCRANGNPKPTVQWMVNGEPLQSAPPNPNREVAGDTIIFRDTQISSRAVYQCNTSNEHGYLLANAFVSVLDVPPRMLSPRNQLIRVILYNRTRLDCPFFGSPIPTLRWFKNGQGSNLDGGNYHVYENGSLEIKMIRKEDQGIYTCVATNILGKAENQVRLEVKDPTRIYRMPEDQVARRGTTVQLECRVKHDPSLKLTVSWLKDDEPLYIGNRMKKEDDSLTIFGVAERDQGSYTCVASTELDQDLAKAYLTVLADQATPTNRLAALPKGRPDRPRDLELTDLAERSVRLTWIPGDANNSPITDYVVQFEEDQFQPGVWHDHSKYPGSVNSAVLRLSPYVNYQFRVIAINEVGSSHPSLPSERYRTSGAPPESNPGDVKGEGTRKNNMEITWTPMNATSAFGPNLRYIVKWRRRETREAWNNVTVWGSRYVVGQTPVYVPYEIRVQAENDFGKGPEPESVIGYSGEDYPRAAPTEVKVRVMNSTAISLQWNRVYSDTVQGQLREYRAYYWRESSLLKNLWVSQKRQQASFPGDRLRGVVSRLFPYSNYKLEMVVVNGRGDGPRSETKEFTTPEGVPSAPRRFRVRQPNLETINLEWDHPEHPNGIMIGYTLKYVAFNGTKVGKQIVENFSPNQTKFTVQRTDPVSRYRFTLSARTQVGSGEAVTEESPAPPNEATPTAAPPTLPPTTVGATGAVSSTDATAIAATTEATTVPIIPTVAPTTIATTTTVATTTTTTAAATTTTESPPTTTSGTKIHESAPDEQSIWNVTVLPNSKWANITWKHNFGPGTDFVVEYIDSNHTKKTVPVKAQAQPIQLTDLYPGMTYTLRVYSRDNEGISSTVITFMTSTAYTNNQADIATQGW

SEQ ID NO: 2770 - protein, 250 aa, synthetic construct
  REGION 1..250: note = NGFR (P08138) SP+PP+ECD
MGAGATGRAMDGPRLLLLLLLGVSLGGAKEACPTGLYTHSGECCKACNLGEGVAQPCGANQTVCEPCLDSVTFSDVVSATEPCKPCTECVGLQSMSAPCVEADDAVCRCAYGYYQDETTGRCEACRVCEAGSGLVFSCQDKQNTVCEECPDGTYSDEANHVDPCLPCTVCEDTERQLRECTRWADAECEEIPGRWITRSTPPEGSDSTAPSTQEPEAPPEQDLIASTVAGVVTTVMGSSQPVVTRGTTDN

SEQ ID NO: 2771 - protein, 717 aa, synthetic construct
  REGION 1..717: note = NLGN1 (Q8N2Q7) SP+PP+ECD
MALPRCTWPNYVWRAVMACLVHRGLGAPLTLCMLGCLLQAGHVLSQKLDDVDPLVATNFGKIRGIKKELNNEILGPVIQFLGVPYAAPPTGERRFQPPEPPSPWSDIRNATQFAPVCPQNIIDGRLPEVMLPVWFTNNLDVVSSYVQDQSEDCLYLNIYVPTEDVKRISKECARKPGKKICRKGGPLTKKQTDDLGDNDGAEDEDIRDSGGPKPVMVYIHGGSYMEGTGNLYDGSVLASYGNVIVITVNYRLGVLGFLSTGDQAAKGNYGLLDLIQALRWTSENIGFFGGDPLRITVFGSGAGGSCVNLLTLSHYSEGNRWSNSTKGLFQRAIAQSGTALSSWAVSFQPAKYARMLATKVGCNVSDTVELVECLQKKPYKELVDQDIQPARYHIAFGPVIDGDVIPDDPQILMEQGEFLNYDIMLGVNQGEGLKFVENIVDSDDGISASDFDFAVSNFVDNLYGYPEGKDVLRETIKFMYTDWADRHNPETRRKTLLALFTDHQWVAPAVATADLHSNFGSPTYFYAFYHHCQTDQVPAWADAAHGDEVPYVLGIPMIGPTELFPCNFSKNDVMLSAVVMTYWTNFAKTGDPNQPVPQDTKFIHTKPNRFEEVAWTRYSQKDQLYLHIGLKPRVKEHYRANKVNLWLELVPHLHNLNDISQYTSTTTKVPSTDITFRPTRKNSVPVTSAFPTAKQDDPKQQPSPFSVDQRDYSTELS

SEQ ID NO: 2772 - protein, 677 aa, synthetic construct
  REGION 1..677: note = NLGN2 (Q8NFZ4) SP+PP+ECD
MWLLALCLVGLAGAQRGGGGPGGGAPGGPGLGLGSLGEERFPVVNTAYGRVRGVRRELNNEILGPVVQFLGVPYATPPLGARRFQPPEAPASWPGVRNATTLPPACPQNLHGALPAIMLPVWFTDNLEAAATYVQNQSEDCLYLNLYVPTEDGPLTKKRDEATLNPPDTDIRDPGKKPVMLFLHGGSYMEGTGNMFDGSVLAAYGNVIVATLNYRLGVLGFLSTGDQAAKGNYGLLDQIQALRWLSENIAHFGGDPERITIFGSGAGASCVNLLILSHHSEGLFQKAIAQSGTAISSWSVNYQPLKYTRLLAAKVGCDREDSAEAVECLRRKPSRELVDQDVQPARYHIAFGPVVDGDVVPDDPEILMQQGEFLNYDMLIGVNQGEGLKFVEDSAESEDGVSASAFDFTVSNFVDNLYGYPEGKDVLRETIKFMYTDWADRDNGEMRRKTLLALFTDHQWVAPAVATAKLHADYQSPVYFYTFYHHCQAEGRPEWADAAHGDELPYVFGVPMVGATDLFPCNFSKNDVMLSAVVMTYWTNFAKTGDPNQPVPQDTKFIHTKPNRFEEVVWSKFNSKEKQYLHIGLKPRVRDNYRANKVAFWLELVPHLHNLHTELFTTTTRLPPYATRWPPRPPAGAPGTRRPPPPATLPPEPEPEPGPRAYDRFPGDSRDYSTELS

SEQ ID NO: 2773 - protein, 709 aa, synthetic construct
  REGION 1..709: note = NLGN3 (Q9NZ94) SP+PP+ECD
MWLRLGPPSLSLSPKPTVGRSLCLTLWFLSLALRASTQAPAPTVNTHFGKLRGARVPLPSEILGPVDQYLGVPYAAPPIGEKRFLPPEPPPSWSGIRNATHFPPVCPQNIHTAVPEVMLPVWFTANLDIVATYIQEPNEDCLYLNVYVPTEDVKRISKECARKPNKKICRKGGSGAKKQGEDLADNDGDEDEDIRDSGAKPVMVYIHGGSYMEGTGNMIDGSILASYGNVIVITLNYRVGVLGFLSTGDQAAKGNYGLLDQIQALRWVSENIAFFGGDPRRITVFGSGIGASCVSLLTLSHHSEGLFQRAIIQSGSALSSWAVNYQPVKYTSLLADKVGCNVLDTVDMVDCLRQKSAKELVEQDIQPARYHVAFGPVIDGDVIPDDPEILMEQGEFLNYDIMLGVNQGEGLKFVEGVVDPEDGVSGTDFDYSVSNFVDNLYGYPEGKDTLRETIKFMYTDWADRDNPETRRKTLVALFTDHQWVEPSVVTADLHARYGSPTYFYAFYHHCQSLMKPAWSDAAHGDEVPYVFGVPMVGPTDLFPCNFSKNDVMLSAVVMTYWTNFAKTGDPNKPVPQDTKFIHTKANRFEEVAWSKYNPRDQLYLHIGLKPRVRDHYRATKVAFWKHLVPHLYNLHDMFHYTSTTTKVPPPDTTHSSHITRRPNGKTWSTKRPAISPAYSNENAQGSWNGDQDAGPLLVENPRDYSTELS

SEQ ID NO: 2774 - protein, 676 aa, synthetic construct
  REGION 1..676: note = NLGN4X (Q8N0W4) SP+PP+ECD
MSRPQGLLWLPLLFTPVCVMLNSNVLLWLTALAIKFTLIDSQAQYPVVNTNYGKIRGLRTPLPNEILGPVEQYLGVPYASPPTGERRFQPPEPPSSWTGIRNTTQFAAVCPQHLDERSLLHDMLPIWFTANLDTLMTYVQDQNEDCLYLNIYVPTEDDIHDQNSKKPVMVYIHGGSYMEGTGNMIDGSILASYGNVIVITINYRLGILGFLSTGDQAAKGNYGLLDQIQALRWIEENVGAFGGDPKRVTIFGSGAGASCVSLLTLSHYSEGLFQKAIIQSGTALSSWAVNYQPAKYTRILADKVGCNMLDTTDMVECLRNKNYKELIQQTITPATYHIAFGPVIDGDVIPDDPQILMEQGEFLNYDIMLGVNQGEGLKFVDGIVDNEDGVTPNDFDFSVSNFVDNLYGYPEGKDTLRETIKFMYTDWADKENPETRRKTLVALFTDHQWVAPAVATADLHAQYGSPTYFYAFYHHCQSEMKPSWADSAHGDEVPYVFGIPMIGPTELFSCNFSKNDVMLSAVVMTYWTNFAKTGDPNQPVPQDTKFIHTKPNRFEEVAWSKYNPKDQLYLHIGLKPRVRDHYRATKVAFWLELVPHLHNLNEIFQYVSTTTKVPPPDMTSFPYGTRRSPAKIWPTTKRPAITPANNPKHSKDPHKTGPEDTTVLIETKRDYSTELS

SEQ ID NO: 2775 - protein, 676 aa, synthetic construct
  REGION 1..676: note = NLGN4Y (Q8NFZ3) SP+PP+ECD
MLRPQGLLWLPLLFTSVCVMLNSNVLLWITALAIKFTLIDSQAQYPVVNTNYGKIQGLRTPLPSEILGPVEQYLGVPYASPPTGERRFQPPESPSSWTGIRNATQFSAVCPQHLDERFLLHDMLPIWFTTSLDTLMTYVQDQNEDCLYLNIYVPMEDDIHEQNSKKPVMVYIHGGSYMEGTGNMIDGSILASYGNVIVITINYRLGILGFLSTGDQAAKGNYGLLDQIQALRWIEENVGAFGGDPKRVTIFGSGAGASCVSLLTLSHYSEGLFQKAIIQSGTALSSWAVNYQPAKYTRILADKVGCNMLDTTDMVECLKNKNYKELIQQTITPATYHIAFGPVIDGDVIPDDPQILMEQGEFLNYDIMLGVNQGEGLKFVDGIVDNEDGVTPNDFDFSVSNFVDNLYGYPEGKDTLRETIKFMYTDWADKENPETRRKTLVALFTDHQWVAPAVATADLHAQYGSPTYFYAFYHHCQSEMKPSWADSAHGDEVPYVFGIPMIGPTELFSCNFSKNDVMLSAVVMTYWTNFAKTGDPNQPVPQDTKFIHTKPNRFEEVAWSKYNPKDQLYLHIGLKPRVRDHYRATKVAFWLELVPHLHNLNEIFQYVSTTTKVPPPDMTSFPYGTRRSPAKIWPTTKRPAITPANNPKHSKDPHKTGPEDTTVLIETKRDYSTELS

SEQ ID NO: 2776 - protein, 1735 aa, synthetic construct
  REGION 1..1735: note = NOTCH1 (P46531) SP+PP+ECD
MPPLLAPLLCLALLPALAARGPRCSQPGETCLNGGKCEAANGTEACVCGGAFVGPRCQDPNPCLSTPCKNAGTCHVVDRRGVADYACSCALGFSGPLCLTPLDNACLTNPCRNGGTCDLLTLTEYKCRCPPGWSGKSCQQADPCASNPCANGGQCLPFEASYICHCPPSFHGPTCRQDVNECGQKPGLCRHGGTCHNEVGSYRCVCRATHTGPNCERPYVPCSPSPCQNGGTCRPTGDVTHECACLPGFTGQNCEENIDDCPGNNCKNGGACVDGVNTYNCRCPPEWTGQYCTEDVDECQLMPNACQNGGTCHNTHGGYNCVCVNGWTGEDCSENIDDCASAACFHGATCHDRVASFYCECPHGRTGLLCHLNDACISNPCNEGSNCDTNPVNGKAICTCPSGYTGPACSQDVDECSLGANPCEHAGKCINTLGSFECQCLQGYTGPRCEIDVNECVSNPCQNDATCLDQIGEFQCICMPGYEGVHCEVNTDECASSPCLHNGRCLDKINEFQCECPTGFTGHLCQYDVDECASTPCKNGAKCLDGPNTYTCVCTEGYTGTHCEVDIDECDPDPCHYGSCKDGVATFTCLCRPGYTGHHCETNINECSSQPCRHGGTCQDRDNAYLCFCLKGTTGPNCEINLDDCASSPCDSGTCLDKIDGYECACEPGYTGSMCNINIDECAGNPCHNGGTCEDGINGFTCRCPEGYHDPTCLSEVNECNSNPCVHGACRDSLNGYKCDCDPGWSGTNCDINNNECESNPCVNGGTCKDMTSGYVCTCREGFSGPNCQTNINECASNPCLNQGTCIDDVAGYKCNCLLPYTGATCEVVLAPCAPSPCRNGGECRQSEDYESFSCVCPTGWQGQTCEVDINECVLSPCRHGASCQNTHGGYRCHCQAGYSGRNCETDIDDCRPNPCHNGGSCTDGINTAFCDCLPGFRGTFCEEDINECASDPCRNGANCTDCVDSYTCTCPAGFSGIHCENNTPDCTESSCFNGGTCVDGINSFTCLCPPGFTGSYCQHDVNECDSQPCLHGGTCQDGCGSYRCTCPQGYTGPNCQNLVHWCDSSPCKNGGKCWQTHTQYRCECPSGWTGLYCDVPSVSCEVAAQRQGVDVARLCQHGGLCVDAGNTHHCRCQAGYTGSYCEDLVDECSPSPCQNGATCTDYLGGYSCKCVAGYHGVNCSEEIDECLSHPCQNGGTCLDLPNTYKCSCPRGTQGVHCEINVDDCNPPVDPVSRSPKCFNNGTCVDQVGGYSCTCPPGFVGERCEGDVNECLSNPCDARGTQNCVQRVNDFHCECRAGHTGRRCESVINGCKGKPCKNGGTCAVASNTARGFICKCPAGFEGATCENDARTCGSLRCLNGGTCISGPRSPTCLCLGPFTGPECQFPASSPCLGGNPCYNQGTCEPTSESPFYRCLCPAKFNGLLCHILDYSFGGGAGRDIPPPLIEEACELPECQEDAGNKVCSLQCNNHACGWDGGDCSLNFNDPWKNCTQSLQCWKYFSDGHCDSQCNSAGCLFDGFDCQRAEGQCNPLYDQYCKDHFSDGHCDQGCNSAECEWDGLDCAEHVPERLAAGTLVVVVLMPPEQLRNSSFHFLRELSRVLHTNVVFKRDAHGQQMIFPYYGREEELRKHPIKRAAEGWAAPDALLGQVKASLLPGGSEGGRRRRELDPMDVRGSIVYLEIDNRQCVQASSQCFQSATDVAAFLGALASLGSLNIPYKIEAVQSETVEPPPPAQLH

SEQ ID NO: 2777 - protein, 1677 aa, synthetic construct
  REGION 1..1677: note = NOTCH2 (Q04721) SP+PP+ECD
MPALRPALLWALLALWLCCAAPAHALQCRDGYEPCVNEGMCVTYHNGTGYCKCPEGFLGEYCQHRDPCEKNRCQNGGTCVAQAMLGKATCRCASGFTGEDCQYSTSHPCFVSRPCLNGGTCHMLSRDTYECTCQVGFTGKECQWTDACLSHPCANGSTCTTVANQFSCKCLTGFTGQKCETDVNECDIPGHCQHGGTCLNLPGSYQCQCPQGFTGQYCDSLYVPCAPSPCVNGGTCRQTGDFTFECNCLPGFEGSTCERNIDDCPNHRCQNGGVCVDGVNTYNCRCPPQWTGQFCTEDVDECLLQPNACQNGGTCANRNGGYGCVCVNGWSGDDCSENIDDCAFASCTPGSTCIDRVASFSCMCPEGKAGLLCHLDDACISNPCHKGALCDTNPLNGQYICTCPQGYKGADCTEDVDECAMANSNPCEHAGKCVNTDGAFHCECLKGYAGPRCEMDINECHSDPCQNDATCLDKIGGFTCLCMPGFKGVHCELEINECQSNPCVNNGQCVDKVNRFQCLCPPGFTGPVCQIDIDDCSSTPCLNGAKCIDHPNGYECQCATGFTGVLCEENIDNCDPDPCHHGQCQDGIDSYTCICNPGYMGAICSDQIDECYSSPCLNDGRCIDLVNGYQCNCQPGTSGVNCEINFDDCASNPCIHGICMDGINRYSCVCSPGFTGQRCNIDIDECASNPCRKGATCINGVNGFRCICPEGPHHPSCYSQVNECLSNPCIHGNCTGGLSGYKCLCDAGWVGINCEVDKNECLSNPCQNGGTCDNLVNGYRCTCKKGFKGYNCQVNIDECASNPCLNQGTCFDDISGYTCHCVLPYTGKNCQTVLAPCSPNPCENAAVCKESPNFESYTCLCAPGWQGQRCTIDIDECISKPCMNHGLCHNTQGSYMCECPPGFSGMDCEEDIDDCLANPCQNGGSCMDGVNTFSCLCLPGFTGDKCQTDMNECLSEPCKNGGTCSDYVNSYTCKCQAGFDGVHCENNINECTESSCFNGGTCVDGINSFSCLCPVGFTGSFCLHEINECSSHPCLNEGTCVDGLGTYRCSCPLGYTGKNCQTLVNLCSRSPCKNKGTCVQKKAESQCLCPSGWAGAYCDVPNVSCDIAASRRGVLVEHLCQHSGVCINAGNTHYCQCPLGYTGSYCEEQLDECASNPCQHGATCSDFIGGYRCECVPGYQGVNCEYEVDECQNQPCQNGGTCIDLVNHFKCSCPPGTRGLLCEENIDDCARGPHCLNGGQCMDRIGGYSCRCLPGFAGERCEGDINECLSNPCSSEGSLDCIQLTNDYLCVCRSAFTGRHCETFVDVCPQMPCLNGGTCAVASNMPDGFICRCPPGFSGARCQSSCGQVKCRKGEQCVHTASGPRCFCPSPRDCESGCASSPCQHGGSCHPQRQPPYYSCQCAPPFSGSRCELYTAPPSTPPATCLSQYCADKARDGVCDEACNSHACQWDGGDCSLTMENPWANCSSPLPCWDYINNQCDELCNTVECLFDNFECQGNSKTCKYDKYCADHFKDNHCDQGCNSEECGWDGLDCAADQPENLAEGTLVIVVLMPPEQLLQDARSFLRALGTLLHTNLRIKRDSQGELMVYPYYGEKSAAMKKQRMTRRSLPGEQEQEVAGSKVFLEIDNRQCVQDSDHCFKNTDAAAALLASHAIQGTLSYPLVSVVSESLTPERTQ

SEQ ID NO: 2778 - protein, 1643 aa, synthetic construct
  REGION 1..1643: note = NOTCH3 (Q9UM47) SP+PP+ECD
MGPGARGRRRRRRPMSPPPPPPPVRALPLLLLLAGPGAAAPPCLDGSPCANGGRCTQLPSREAACLCPPGWVGERCQLEDPCHSGPCAGRGVCQSSVVAGTARFSCRCPRGFRGPDCSLPDPCLSSPCAHGARCSVGPDGRFLCSCPPGYQGRSCRSDVDECRVGEPCRHGGTCLNTPGSFRCQCPAGYTGPLCENPAVPCAPSPCRNGGTCRQSGDLTYDCACLPGFEGQNCEVNVDDCPGHRCLNGGTCVDGVNTYNCQCPPEWTGQFCTEDVDECQLQPNACHNGGTCFNTLGGHSCVCVNGWTGESCSQNIDDCATAVCFHGATCHDRVASFYCACPMGKTGLLCHLDDACVSNPCHEDAICDTNPVNGRAICTCPPGFTGGACDQDVDECSIGANPCEHLGRCVNTQGSFLCQCGRGYTGPRCETDVNECLSGPCRNQATCLDRIGQFTCICMAGFTGTYCEVDIDECQSSPCVNGGVCKDRVNGFSCTCPSGFSGSTCQLDVDECASTPCRNGAKCVDQPDGYECRCAEGFEGTLCDRNVDDCSPDPCHHGRCVDGIASFSCACAPGYTGTRCESQVDECRSQPCRHGGKCLDLVDKYLCRCPSGTTGVNCEVNIDDCASNPCTFGVCRDGINRYDCVCQPGFTGPLCNVEINECASSPCGEGGSCVDGENGFRCLCPPGSLPPLCLPPSHPCAHEPCSHGICYDAPGGFRCVCEPGWSGPRCSQSLARDACESQPCRAGGTCSSDGMGFHCTCPPGVQGRQCELLSPCTPNPCEHGGRCESAPGQLPVCSCPQGWQGPRCQQDVDECAGPAPCGPHGICTNLAGSFSCTCHGGYTGPSCDQDINDCDPNPCLNGGSCQDGVGSFSCSCLPGFAGPRCARDVDECLSNPCGPGTCTDHVASFTCTCPPGYGGFHCEQDLPDCSPSSCFNGGTCVDGVNSFSCLCRPGYTGAHCQHEADPCLSRPCLHGGVCSAAHPGFRCTCLESFTGPQCQTLVDWCSRQPCQNGGRCVQTGAYCLCPPGWSGRLCDIRSLPCREAAAQIGVRLEQLCQAGGQCVDEDSSHYCVCPEGRTGSHCEQEVDPCLAQPCQHGGTCRGYMGGYMCECLPGYNGDNCEDDVDECASQPCQHGGSCIDLVARYLCSCPPGTLGVLCEINEDDCGPGPPLDSGPRCLHNGTCVDLVGGFRCTCPPGYTGLRCEADINECRSGACHAAHTRDCLQDPGGGFRCLCHAGFSGPRCQTVLSPCESQPCQHGGQCRPSPGPGGGLTFTCHCAQPFWGPRCERVARSCRELQCPVGVPCQQTPRGPRCACPPGLSGPSCRSFPGSPPGASNASCAAAPCLHGGSCRPAPLAPFFRCACAQGWTGPRCEAPAAAPEVSEEPRCPRAACQAKRGDQRCDRECNSPGCGWDGGDCSLSVGDPWRQCEALQCWRLFNNSRCDPACSSPACLYDNFDCHAGGRERTCNPVYEKYCADHFADGRCDQGCNTEECGWDGLDCASEVPALLARGVLVLTVLLPPEELLRSSADFLQRLSAILRTSLRFRLDAHGQAMVFPYHRPSPGSEPRARRELAPEVIGSVVMLEIDNRLCLQSPENDHCFPDAQSAADYLGALSAVERLDFPYPLRDVRGEPLEPPEPSVPL

SEQ ID NO: 2779 - protein, 1447 aa, synthetic construct
  REGION 1..1447: note = NOTCH4 (Q99466) SP+PP+ECD
MQPPSLLLLLLLLLLLCVSVVRPRGLLCGSFPEPCANGGTCLSLSLGQGTCQCAPGFLGETCQFPDPCQNAQLCQNGGSCQALLPAPLGLPSSPSPLTPSFLCTCLPGFTGERCQAKLEDPCPPSFCSKRGRCHIQASGRPQCSCMPGWTGEQCQLRDFCSANPCVNGGVCLATYPQIQCHCPPGFEGHACERDVNECFQDPGPCPKGTSCHNTLGSFQCLCPVGQEGPRCELRAGPCPPRGCSNGGTCQLMPEKDSTFHLCLCPPGFIGPDCEVNPDNCVSHQCQNGGTCQDGLDTYTCLCPETWTGWDCSEDVDECETQGPPHCRNGGTCQNSAGSFHCVCVSGWGGTSCEENLDDCIAATCAPGSTCIDRVGSFSCLCPPGRTGLLCHLEDMCLSQPCHGDAQCSTNPLTGSTLCLCQPGYSGPTCHQDLDECLMAQQGPSPCEHGGSCLNTPGSFNCLCPPGYTGSRCEADHNECLSQPCHPGSTCLDLLATFHCLCPPGLEGQLCEVETNECASAPCLNHADCHDLLNGFQCICLPGFSGTRCEEDIDECRSSPCANGGQCQDQPGAFHCKCLPGFEGPRCQTEVDECLSDPCPVGASCLDLPGAFFCLCPSGFTGQLCEVPLCAPNLCQPKQICKDQKDKANCLCPDGSPGCAPPEDNCTCHHGHCQRSSCVCDVGWTGPECEAELGGCISAPCAHGGTCYPQPSGYNCTCPTGYTGPTCSEEMTACHSGPCLNGGSCNPSPGGYYCTCPPSHTGPQCQTSTDYCVSAPCFNGGTCVNRPGTFSCLCAMGFQGPRCEGKLRPSCADSPCRNRATCQDSPQGPRCLCPTGYTGGSCQTLMDLCAQKPCPRNSHCLQTGPSFHCLCLQGWTGPLCNLPLSSCQKAALSQGIDVSSLCHNGGLCVDSGPSYFCHCPPGFQGSLCQDHVNPCESRPCQNGATCMAQPSGYLCQCAPGYDGQNCSKELDACQSQPCHNHGTCTPKPGGFHCACPPGFVGLRCEGDVDECLDQPCHPTGTAACHSLANAFYCQCLPGHTGQWCEVEIDPCHSQPCFHGGTCEATAGSPLGFICHCPKGFEGPTCSHRAPSCGFHHCHHGGLCLPSPKPGFPPRCACLSGYGGPDCLTPPAPKGCGPPSPCLYNGSCSETTGLGGPGFRCSCPHSSPGPRCQKPGAKGCEGRSGDGACDAGCSGPGGNWDGGDCSLGVPDPWKGCPSHSRCWLLFRDGQCHPQCDSEECLFDGYDCETPPACTPAYDQYCHDHFHNGHCEKGCNTAECGWDGGDCRPEDGDPEWGPSLALLVVLSPPALDQQLFALARVLSLTLRVGLWVRKDRDGRDMVYPYPGARAEEKLGGTRDPTYQERAAPQTQPLGKETDSLSAGFVVVMGVDLSRCGPDHPASRCPWDPGLLLRFLAAMAAVGALEPLLPGPLLAVHPHAGTAPPANQLPW

SEQ ID NO: 2780 - protein, 1055 aa, synthetic construct
  REGION 1..1055: note = NPHS1 (O60500) SP+PP+ECD
MALGTTLRASLLLLGLLTEGLAQLAIPASVPRGFWALPENLTVVEGASVELRCGVSTPGSAVQWAKDGLLLGPDPRIPGFPRYRLEGDPARGEFHLHIEACDLSDDAEYECQVGRSEMGPELVSPRVILSILVPPKLLLLTPEAGTMVTWVAGQEYVVNCVSGDAKPAPDITILLSGQTISDISANVNEGSQQKLFTVEATARVTPRSSDNRQLLVCEASSPALEAPIKASFTVNVLFPPGPPVIEWPGLDEGHVRAGQSLELPCVARGGNPLATLQWLKNGQPVSTAWGTEHTQAVARSVLVMTVRPEDHGAQLSCEAHNSVSAGTQEHGITLQVTFPPSAIIILGSASQTENKNVTLSCVSKSSRPRVLLRWWLGWRQLLPMEETVMDGLHGGHISMSNLTFLARREDNGLTLTCEAFSEAFTKETFKKSLILNVKYPAQKLWIEGPPEGQKLRAGTRVRLVCLAIGGNPEPSLMWYKDSRTVTESRLPQESRRVHLGSVEKSGSTFSRELVLVTGPSDNQAKFTCKAGQLSASTQLAVQFPPTNVTILANASALRPGDALNLTCVSVSSNPPVNLSWDKEGERLEGVAAPPRRAPFKGSAAARSVLLQVSSRDHGQRVTCRAHSAELRETVSSFYRLNVLYRPEFLGEQVLVVTAVEQGEALLPVSVSANPAPEAFNWTFRGYRLSPAGGPRHRILSSGALHLWNVTRADDGLYQLHCQNSEGTAEARLRLDVHYAPTIRALQDPTEVNVGGSVDIVCTVDANPILPGMFNWERLGEDEEDQSLDDMEKISRGPTGRLRIHHAKLAQAGAYQCIVDNGVAPPARRLLRLVVRFAPQVEHPTPLTKVAAAGDSTSSATLHCRARGVPNIVFTWTKNGVPLDLQDPRYTEHTYHQGGVHSSLLTIANVSAAQDYALFTCTATNALGSDQTNIQLVSISRPDPPSGLKVVSLTPHSVGLEWKPGFDGGLPQRFCIRYEALGTPGFHYVDVVPPQATTFTLTGLQPSTRYRVWLLASNALGDSGLADKGTQLPITTPGLHQPSGEPEDQLPTEPPS

SEQ ID NO: 2781 - protein, 473 aa, synthetic construct
  REGION 1..473: note = NPR1 (P16066) SP+PP+ECD
MPGPRRPAGSRLRLLLLLLLPPLLLLLRGSHAGNLTVAVVLPLANTSYPWSWARVGPAVELALAQVKARPDLLPGWTVRTVLGSSENALGVCSDTAAPLAAVDLKWEHNPAVFLGPGCVYAAAPVGRFTAHWRVPLLTAGAPALGFGVKDEYALTTRAGPSYAKLGDFVAALHRRLGWERQALMLYAYRPGDEEHCFFLVEGLFMRVRDRLNITVDHLEFAEDDLSHYTRLLRTMPRKGRVIYICSSPDAFRTLMLLALEAGLCGEDYVFFHLDIFGQSLQGGQGPAPRRPWERGDGQDVSARQAFQAAKIITYKDPDNPEYLEFLKQLKHLAYEQFNFTMEDGLVNTIPASFHDGLLLYIQAVTETLAHGGTVTDGENITQRMWNRSFQGVTGYLKIDSSGDRETDFSLWDMDPENGAFRVVLNYNGTSQELVAVSGRKLNWPLGYPPPDIPKCGFDNEDPACNQDHLSTLE

SEQ ID NO: 2782 - protein, 458 aa, synthetic construct
  REGION 1..458: note = NPR2 (P20594) SP+PP+ECD
MALPSLLLLVAALAGGVRPPGARNLTLAVVLPEHNLSYAWAWPRVGPAVALAVEALGRALPVDLRFVSSELEGACSEYLAPLSAVDLKLYHDPDLLLGPGCVYPAASVARFASHWRLPLLTAGAVASGFSAKNDHYRTLVRTGPSAPKLGEFVVTLHGHFNWTARAALLYLDARTDDRPHYFTIEGVFEALQGSNLSVQHQVYAREPGGPEQATHFIRANGRIVYICGPLEMLHEILLQAQRENLTNGDYVFFYLDVFGESLRAGPTRATGRPWQDNRTREQAQALREAFQTVLVITYREPPNPEYQEFQNRLLIRAREDFGVELGPSLMNLIAGCFYDGILLYAEVLNETIQEGGTREDGLRIVEKMQGRRYHGVTGLVVMDKNNDRETDFVLWAMGDLDSGDFQPAAHYSGAEKQIWWTGRPIPWVKGAPPSDNPPCAFDLDDPSCDKTPLSTLAI

SEQ ID NO: 2783 - protein, 481 aa, synthetic construct
  REGION 1..481: note = NPR3 (P17342) SP+PP+ECD
MPSLLVLTFSPCVLLGWALLAGGTGGGGVGGGGGGAGIGGGRQEREALPPQKIEVLVLLPQDDSYLFSLTRVRPAIEYALRSVEGNGTGRRLLPPGTRFQVAYEDSDCGNRALFSLVDRVAAARGAKPDLILGPVCEYAAAPVARLASHWDLPMLSAGALAAGFQHKDSEYSHLTRVAPAYAKMGEMMLALFRHHHWSRAALVYSDDKLERNCYFTLEGVHEVFQEEGLHTSIYSFDETKDLDLEDIVRNIQASERVVIMCASSDTIRSIMLVAHRHGMTSGDYAFFNIELFNSSSYGDGSWKRGDKHDFEAKQAYSSLQTVTLLRTVKPEFEKFSMEVKSSVEKQGLNMEDYVNMFVEGFHDAILLYVLALHEVLRAGYSKKDGGKIIQQTWNRTFEGIAGQVSIDANGDRYGDFSVIAMTDVEAGTQEVIGDYFGKEGRFEMRPNVKYPWGPLKLRIDENRIVEHTNSSPCKSSGGLEE

SEQ ID NO: 2784 - protein, 339 aa, synthetic construct
  REGION 1..339: note = NPTN (Q9Y639) SP+PP+ECD
MSGSSLPSALALSLLLVSGSLLPGPGAAQNAGFVKSPMSETKLTGDAFELYCDVVGSPTPEIQWWYAEVNRAESFRQLWDGARKRRVTVNTAYGSNGVSVLRITRLTLEDSGTYECRASNDPKRNDLRQNPSITWIRAQATISVLQKPRIVTSEEVIIRDSPVLPVTLQCNLTSSSHTLTYSYWTKNGVELSATRKNASNMEYRINKPRAEDSGEYHCVYHFVSAPKANATIEVKAAPDITGHKRSENKNEGQDATMYCKSVGYPHPDWIWRKKENGMPMDIVNTSGRFFIINKENYTELNIVNLQITEDPGEYECNATNAIGSASVVTVLRVRSHLAP

SEQ ID NO: 2785 - protein, 1167 aa, synthetic construct
  REGION 1..1167: note = NRCAM (Q92823) SP+PP+ECD
MQLKIMPKKKRLSAGRVPLILFLCQMISALEVPLDPKLLEDLVQPPTITQQSPKDYIIDPRENIVIQCEAKGKPPPSFSWTRNGTHFDIDKDPLVTMKPGTGTLIINIMSEGKAETYEGVYQCTARNERGAAVSNNIVVRPSRSPLWTKEKLEPITLQSGQSLVLPCRPPIGLPPPIIFWMDNSFQRLPQSERVSQGLNGDLYFSNVLPEDTREDYICYARFNHTQTIQQKQPISVKVISVDELNDTIAANLSDTEFYGAKSSRERPPTFLTPEGNASNKEELRGNVLSLECIAEGLPTPIIYWAKEDGMLPKNRTVYKNFEKTLQIIHVSEADSGNYQCIAKNALGAIHHTISVRVKAAPYWITAPQNLVLSPGEDGTLICRANGNPKPRISWLTNGVPIEIAPDDPSRKIDGDTIIFSNVQERSSAVYQCNASNEYGYLLANAFVNVLAEPPRILTPANTLYQVIANRPALLDCAFFGSPLPTIEWFKGAKGSALHEDIYVLHENGTLEIPVAQKDSTGTYTCVARNKLGMAKNEVHLEIKDPTWIVKQPEYAVVQRGSMVSFECKVKHDHTLSLTVLWLKDNRELPSDERFTVDKDHLVVADVSDDDSGTYTCVANTTLDSVSASAVLSVVAPTPTPAPVYDVPNPPFDLELTDQLDKSVQLSWTPGDDNNSPITKFIIEYEDAMHKPGLWHHQTEVSGTQTTAQLKLSPYVNYSFRVMAVNSIGKSLPSEASEQYLTKASEPDKNPTAVEGLGSEPDNLVITWKPLNGFESNGPGLQYKVSWRQKDGDDEWTSVVVANVSKYIVSGTPTFVPYLIKVQALNDMGFAPEPAVVMGHSGEDLPMVAPGNVRVNVVNSTLAEVHWDPVPLKSIRGHLQGYRIYYWKTQSSSKRNRRHIEKKILTFQGSKTHGMLPGLEPFSHYTLNVRVVNGKGEGPASPDRVFNTPEGVPSAPSSLKIVNPTLDSLTLEWDPPSHPNGILTEYTLKYQPINSTHELGPLVDLKIPANKTRWTLKNLNFSTRYKFYFYAQTSAGSGSQITEEAVTTVDEAGILPPDVGAGKVQAVNPRISNLTAAAAETYANISWEYEGPEHVNFYVEYGVAGSKEEWRKEIVNGSRSFFGLKGLMPGTAYKVRVGAVGDSGFVSSEDVFETGPAMASRQVDIATQ

SEQ ID NO: 2786 - protein, 856 aa, synthetic construct
  REGION 1..856: note = NRP1 (O14786) SP+PP+ECD
MERGLPLLCAVLALVLAPAGAFRNDKCGDTIKIESPGYLTSPGYPHSYHPSEKCEWLIQAPDPYQRIMINFNPHFDLEDRDCKYDYVEVFDGENENGHFRGKFCGKIAPPPVVSSGPFLFIKFVSDYETHGAGFSIRYEIFKRGPECSQNYTTPSGVIKSPGFPEKYPNSLECTYIVFVPKMSEIILEFESFDLEPDSNPPGGMFCRYDRLEIWDGFPDVGPHIGRYCGQKTPGRIRSSSGILSMVFYTDSAIAKEGFSANYSVLQSSVSEDFKCMEALGMESGEIHSDQITASSQYSTNWSAERSRLNYPENGWTPGEDSYREWIQVDLGLLRFVTAVGTQGAISKETKKKYYVKTYKIDVSSNGEDWITIKEGNKPVLFQGNTNPTDVVVAVFPKPLITRFVRIKPATWETGISMRFEVYGCKITDYPCSGMLGMVSGLISDSQITSSNQGDRNWMPENIRLVTSRSGWALPPAPHSYINEWLQIDLGEEKIVRGIIIQGGKHRENKVFMRKFKIGYSNNGSDWKMIMDDSKRKAKSFEGNNNYDTPELRTFPALSTRFIRIYPERATHGGLGLRMELLGCEVEAPTAGPTTPNGNLVDECDDDQANCHSGTGDDFQLTGGTTVLATEKPTVIDSTIQSEFPTYGFNCEFGWGSHKTFCHWEHDNHVQLKWSVLTSKTGPIQDHTGDGNFIYSQADENQKGKVARLVSPVVYSQNSAHCMTFWYHMSGSHVGTLRVKLRYQKPEEYDQLVWMAIGHQGDHWKEGRVLLHKSLKLYQVIFEGEIGKGNLGGIAVDDISINNHISQEDCAKPADLDKKNPEIKIDETGSTPGYEGEGEGDKNISRKPGNVLKTLDP

SEQ ID NO: 2787 - protein, 864 aa, synthetic construct
  REGION 1..864: note = NRP2 (O60462) SP+PP+ECD
MDMFPLTWVFLALYFSRHQVRGQPDPPCGGRLNSKDAGYITSPGYPQDYPSHQNCEWIVYAPEPNQKIVLNFNPHFEIEKHDCKYDFIEIRDGDSESADLLGKHCGNIAPPTIISSGSMLYIKFTSDYARQGAGFSLRYEIFKTGSEDCSKNFTSPNGTIESPGFPEKYPHNLDCTFTILAKPKMEIILQFLIFDLEHDPLQVGEGDCKYDWLDIWDGIPHVGPLIGKYCGTKTPSELRSSTGILSLTFHTDMAVAKDGFSARYYLVHQEPLENFQCNVPLGMESGRIANEQISASSTYSDGRWTPQQSRLHGDDNGWTPNLDSNKEYLQVDLRFLTMLTAIATQGAISRETQNGYYVKSYKLEVSTNGEDWMVYRHGKNHKVFQANNDATEVVLNKLHAPLLTRFVRIRPQTWHSGIALRLELFGCRVTDAPCSNMLGMLSGLIADSQISASSTQEYLWSPSAARLVSSRSGWFPRIPQAQPGEEWLQVDLGTPKTVKGVIIQGARGGDSITAVEARAFVRKFKVSYSLNGKDWEYIQDPRTQQPKLFEGNMHYDTPDIRRFDPIPAQYVRVYPERWSPAGIGMRLEVLGCDWTDSKPTVETLGPTVKSEETTTPYPTEEEATECGENCSFEDDKDLQLPSGFNCNFDFLEEPCGWMYDHAKWLRTTWASSSSPNDRTFPDDRNFLRLQSDSQREGQYARLISPPVHLPRSPVCMEFQYQATGGRGVALQVVREASQESKLLWVIREDQGGEWKHGRIILPSYDMEYQIVFEGVIGKGRSGEIAIDDIRISTDVPLENCMEPISAFAGENFKVDIPEIHEREGYEDEIDDEYEVDWSNSSSATSGSGAPSTDKEKSWLYTLDP

SEQ ID NO: 2788 - protein, 650 aa, synthetic construct
  REGION 1..650: note = NRROS (Q86YC3) SP+PP+ECD
MELLPLWLCLGFHFLTVGWRNRSGTATAASQGVCKLVGGAADCRGQSLASVPSSLPPHARMLTLDANPLKTLWNHSLQPYPLLESLSLHSCHLERISRGAFQEQGHLRSLVLGDNCLSENYEETAAALHALPGLRRLDLSGNALTEDMAALMLQNLSSLRSVSLAGNTIMRLDDSVFEGLERLRELDLQRNYIFEIEGGAFDGLAELRHLNLAFNNLPCIVDFGLTRLRVLNVSYNVLEWFLATGGEAAFELETLDLSHNQLLFFPLLPQYSKLRTLLLRDNNMGFYRDLYNTSSPREMVAQFLLVDGNVTNITTVSLWEEFSSSDLADLRFLDMSQNQFQYLPDGFLRKMPSLSHLNLHQNCLMTLHIREHEPPGALTELDLSHNQLSELHLAPGLASCLGSLRLFNLSSNQLLGVPPGLFANARNITTLDMSHNQISLCPLPAASDRVGPPSCVDFRNMASLRSLSLEGCGLGALPDCPFQGTSLTYLDLSSNWGVLNGSLAPLQDVAPMLQVLSLRNMGLHSSFMALDFSGFGNLRDLDLSGNCLTTFPRFGGSLALETLDLRRNSLTALPQKAVSEQLSRGLRTIYLSQNPYDCCGVDGWGALQHGQTVADWAMVTCNLSSKIIRVTELPGGVPRDCKWERLDLGL

SEQ ID NO: 2789 - protein, 396 aa, synthetic construct
  REGION 1..396: note = NRXN1 (P58400) SP+PP+ECD
MYQRMLRCGAELGSPGGGGGGGGGGGAGGRLALLWIVPLTLSGLLGVAWGASSLGAHHIHHFHGSSKHHSVPIAIYRSPASLRGGHAGTTYIFSKGGGQITYKWPPNDRPSTRADRLAIGFSTVQKEAVLVRVDSSSGLGDYLELHIHQGKIGVKFNVGTDDIAIEESNAIINDGKYHVVRFTRSGGNATLQVDSWPVIERYPAGNNDNERLAIARQRIPYRLGRVVDEWLLDKGRQLTIFNSQATIIIGGKEQGQPFQGQLSGLYYNGLKVLNMAAENDANIAIVGNVRLVGEVPSSMTTESTATAMQSEMSTSIMETTTTLATSTARRGKPPTKEPISQTTDDILVASAECPSDDEDIDPCEPSSGGLANPTRAGGREPYPGSAEVIRESSSTT

SEQ ID NO: 2790 - protein, 396 aa, synthetic construct; identical to SEQ ID NO: 2789
  REGION 1..396: note = NRXN1 (Q9ULB1) SP+PP+ECD

SEQ ID NO: 2791 - protein, 590 aa, synthetic construct
  REGION 1..590: note = NRXN2 (P58401) SP+PP+ECD
MPPGGSGPGGCPRRPPALAGPLPPPPPPPPPPLLPLLPLLLLLLLGAAEGARVSSSLSTTHHVHHFHSKHGTVPIAINRMPFLTRGGHAGTTYIFGKGGALITYTWPPNDRPSTRMDRLAVGFSTHQRSAVLVRVDSASGLGDYLQLHIDQGTVGVIFNVGTDDITIDEPNAIVSDGKYHVVRFTRSGGNATLQVDSWPVNERYPAGNFDNERLAIARQRIPYRLGRVVDEWLLDKGRQLTIFNSQAAIKIGGRDQGRPFQGQVSGLYYNGLKVLALAAESDPNVRTEGHLRLVGEGPSVLLSAETTATTLLADMATTIMETTTTMATTTTRRGRSPTLRDSTTQNTDDLLVASAECPSDDEDLEECEPSTGGELILPIITEDSLDPPPVATRSPFVPPPPTFYPFLTGVGATQDTLPPPAARRPPSGGPCQAERDDSDCEEPIEASGFASGEVFDSSLPPTDDEDFYTTFPLVTDRTTLLSPRKPAPRPNLRTDGATGAPGVLFAPSAPAPNLPAGKMNHRDPLQPLLENPPLGPGAPTSFEPRRPPPLRPGVTSAPGFPHLPTANPTGPGERGPPGAVEVIRESSSTT

SEQ ID NO: 2792 - protein, 590 aa, synthetic construct; identical to SEQ ID NO: 2791
  REGION 1..590: note = NRXN2 (Q9P2S2) SP+PP+ECD

SEQ ID NO: 2793 - protein, 562 aa, synthetic construct
  REGION 1..562: note = NRXN3 (Q9HDB5) SP+PP+ECD
MHLRIHARRSPPRRPAWTLGIWFLFWGCIVSSVWSSSNVASSSSTSSSPGSHSQHEHHFHGSKHHSVPISIYRSPVSLRGGHAGATYIFGKSGGLILYTWPANDRPSTRSDRLAVGFSTTVKDGILVRIDSAPGLGDFLQLHIEQGKIGVVFNIGTVDISIKEERTPVNDGKYHVVRFTRNGGNATLQVDNWPVNEHYPTGRQLTIFNTQAQIAIGGKDKGRLFQGQLSGLYYDGLKVLNMAAENNPNIKINGSVRLVGEVPSILGTTQTTSMPPEMSTTVMETTTTMATTTTRKNRSTASIQPTSDDLVSSAECSSDDEDFVECEPSTGGELVIPLLVEDPLATPPIATRAPSITLPPTFRPLLTIIETTKDSLSMTSEAGLPCLSDQGSDGCDDDGLVISGYGSGETFDSNLPPTDDEDFYTTFSLVTDKSLSTSIFEGGYKAHAPKWESKDFRPNKVSETSRTTTTSLSPELIRFTASSSSGMVPKLPAGKMNNRDLKPQPDIVLLPLPTAYELDSTKLKSPLITSPMFRNVPTANPTEPGIRRVPGASEVIRESSSTT

SEQ ID NO: 2794 - protein, 562 aa, synthetic construct; identical to SEQ ID NO: 2793
  REGION 1..562: note = NRXN3 (Q9Y4C0) SP+PP+ECD

SEQ ID NO: 2795 - protein, 423 aa, synthetic construct
  REGION 1..423: note = NTRK1 (P04629) SP+PP+ECD
MLRGGRRGQLGWHSWAAGPGSLLAWLILASAGAAPCPDACCPHGSSGLRCTRDGALDSLHHLPGAENLTELYIENQQHLQHLELRDLRGLGELRNLTIVKSGLRFVAPDAFHFTPRLSRLNLSFNALESLSWKTVQGLSLQELVLSGNPLHCSCALRWLQRWEEEGLGGVPEQKLQCHGQGPLAHMPNASCGVPTLKVQVPNASVDVGDDVLLRCQVEGRGLEQAGWILTELEQSATVMKSGGLPSLGLTLANVTSDLNRKNVTCWAENDVGRAEVSVQVNVSFPASVQLHTAVEMHHWCIPFSVDGQPAPSLRWLFNGSVLNETSFIFTEFLEPAANETVRHGCLRLNQPTHVNNGNYTLLAANPFGQASASIMAAFMDNPFEFNPEDPIPVSFSPVDTNSTSGDPVEKKDETPFGVSVAVG

SEQ ID NO: 2796 - protein, 430 aa, synthetic construct
  REGION 1..430: note = NTRK2 (Q16620) SP+PP+ECD
MSSWIRWHGPAMARLWGFCWLVVGFWRAAFACPTSCKCSASRIWCSDPSPGIVAFPRLEPNSVDPENITEIFIANQKRLEIINEDDVEAYVGLRNLTIVDSGLKFVAHKAFLKNSNLQHINFTRNKLTSLSRKHFRHLDLSELILVGNPFTCSCDIMWIKTLQEAKSSPDTQDLYCLNESSKNIPLANLQIPNCGLPSANLAAPNLTVEEGKSITLSCSVAGDPVPNMYWDVGNLVSKHMNETSHTQGSLRITNISSDDSGKQISCVAENLVGEDQDSVNLTVHFAPTITFLESPTSDHHWCIPFTVKGNPKPALQWFYNGAILNESKYICTKIHVTNHTEYHGCLQLDNPTHMNNGDYTLIAKNEYGKDEKQISAHFMGWPGIDDGANPNYPDVIYEDYGTAANDIGDTTNRSNEIPSTDVTDKTGREH

SEQ ID NO: 2797 - protein, 429 aa, synthetic construct
  REGION 1..429: note = NTRK3 (Q16288) SP+PP+ECD
MDVSLCPAKCSFWRIFLLGSVWLDYVGSVLACPANCVCSKTEINCRRPDDGNLFPLLEGQDSGNSNGNASINITDISRNITSIHIENWRSLHTLNAVDMELYTGLQKLTIKNSGLRSIQPRAFAKNPHLRYINLSSNRLTTLSWQLFQTLSLRELQLEQNFFNCSCDIRWMQLWQEQGEAKLNSQNLYCINADGSQLPLFRMNISQCDLPEISVSHVNLTVREGDNAVITCNGSGSPLPDVDWIVTGLQSINTHQTNLNWTNVHAINLTLVNVTSEDNGFTLTCIAENVVGMSNASVALTVYYPPRVVSLEEPELRLEHCIEFVVRGNPPPTLHWLHNGQPLRESKIIHVEYYQEGEISEGCLLFNKPTHYNNGNYTLIAKNPLGTANQTINGHFLKEPFPESTDNFILFDEVSPTPPITVTHKPEEDT

SEQ ID NO: 2798 - protein, 1808 aa, synthetic construct
  REGION 1..1808: note = NUP210 (Q8TEM1) SP+PP+ECD
MAARGRGLLLLTLSVLLAAGPSAAAAKLNIPKVLLPFTRATRVNFTLEASEGCYRWLSTRPEVASIEPLGLDEQQCSQKAVVQARLTQPARLTSIIFAEDITTGQVLRCDAIVDLIHDIQIVSTTRELYLEDSPLELKIQALDSEGNTFSTLAGLVFEWTIVKDSEADRFSDSHNALRILTFLESTYIPPSYISEMEKAAKQGDTILVSGMKTGSSKLKARIQEAVYKNVRPAEVRLLILENILLNPAYDVYLMVGTSIHYKVQKIRQGKITELSMPSDQYELQLQNSIPGPEGDPARPVAVLAQDTSMVTALQLGQSSLVLGHRSIRMQGASRLPNSTIYVVEPGYLGFTVHPGDRWVLETGRLYEITIEVFDKFSNKVYVSDNIRIETVLPAEFFEVLSSSQNGSYHRIRALKRGQTAIDAALTSVVDQDGGVHILQVPVWNQQEVEIHIPITLYPSILTFPWQPKTGAYQYTIRAHGGSGNFSWSSSSHLVATVTVKGVMTTGSDIGFSVIQAHDVQNPLHFGEMKVYVIEPHSMEFAPCQVEARVGQALELPLRISGLMPGGASEVVTLSDCSHFDLAVEVENQGVFQPLPGRLPPGSEHCSGIRVKAEAQGSTTLLVSYRHGHVHLSAKITIAAYLPLKAVDPSSVALVTLGSSKEMLFEGGPRPWILEPSKFFQNVTAEDTDSIGLALFAPHSSRNYQQHWILVTCQALGEQVIALSVGNKPSLTNPFPAVEPAVVKFVCAPPSRLTLAPVYTSPQLDMSCPLLQQNKQVVPVSSHRNPRLDLAAYDQEGRRFDNFSSLSIQWESTRPVLASIEPELPMQLVSQDDESGQKKLHGLQAILVHEASGTTAITATATGYQESHLSSARTKQPHDPLVPLSASIELILVEDVRVSPEEVTIYNHPGIQAELRIREGSGYFFLNTSTADVVKVAYQEARGVAMVHPLLPGSSTIMIHDLCLVFPAPAKAVVYVSDIQELYIRVVDKVEIGKTVKAYVRVLDLHKKPFLAKYFPFMDLKLRAASPIITLVALDEALDNYTITFLIRGVAIGQTSLTASVTNKAGQRINSAPQQIEVFPPFRLMPRKVTLLIGATMQVTSEGGPQPQSNILFSISNESVALVSAAGLVQGLAIGNGTVSGLVQAVDAETGKVVIISQDLVQVEVLLLRAVRIRAPIMRMRTGTQMPIYVTGITNHQNPFSFGNAVPGLTFHWSVTKRDVLDLRGRHHEASIRLPSQYNFAMNVLGRVKGRTGLRVVVKAVDPTSGQLYGLARELSDEIQVQVFEKLQLLNPEIEAEQILMSPNSYIKLQTNRDGAASLSYRVLDGPEKVPVVHVDEKGFLASGSMIGTSTIEVIAQEPFGANQTIIVAVKVSPVSYLRVSMSPVLHTQNKEALVAVPLGMTVTFTVHFHDNSGDVFHAHSSVLNFATNRDDFVQIGKGPTNNTCVVRTVSVGLTLLRVWDAEHPGLSDFMPLPVLQAISPELSGAMVVGDVLCLATVLTSLEGLSGTWSSSANSILHIDPKTGVAVARAVGSVTVYYEVAGHLRTYKEVVVSVPQRIMARHLHPIQTSFQEATASKVIVAVGDRSSNLRGECTPTQREVIQALHPETLISCQSQFKPAVFDFPSQDVFTVEPQFDTALGQYFCSITMHRLTDKQRKHLSMKKTALVVSASLSSSHFSTEQVGAEVPFSPGLFADQAEILLSNHYTSSEIRVFGAPEVLENLEVKSGSPAVLAFAKEKSFGWPSFITYTVGVLDPAAGSQGPLSTTLTFSSPVTNQAIAIPVTVAFVVDRRGPGPYGASLFQHFLDSYQ

SEQ ID NO: 2799 - protein, 1812 aa, synthetic construct
  REGION 1..1812: note = NUP210L (Q5VU65) SP+PP+ECD
MTGCPASSRRRGFGLFFFLRLHRLLLLFLVLRGTLANKLNVPQVLLPFGREPGRVPFLLEAQRGCYTWHSTHHDAVTVEPLYENGTLCSQKAVLIAESTQPIRLSSIILAREIVTDHELRCDVKVDVINSIEIVSRARELYVDDSPLELMVRALDAEGNTFSSLAGMMFEWSIAQDNESAREELSSKIRILKYSEAEYAPPIYIAEMEKEEKQGDVILVSGIRTGAAVVKVRIHEPFYKKVAAALIRLLVLENIFLIPSHDIYLLVGTYIKYQVAKMVQGRVTEVKFPLEHYILELQDHRVALNGSHSEKVAILDDKTAMVTASQLGQTNLVFVHKNVHMRSVSGLPNCTIYVVEPGFLGFTVQPGNRWSLEVGQVYVITVDVFDKSSTKVYISDNLRITYDFPKEYFEEQLTTVNGSYHIVKALKDGVVVINASLTSIIYQNKDIQPIKFLIKHQQEVKIYFPIMLTPKFLAFPHHPMGMLYRYKVQVEGGSGNFTWTSSNETVVIVTTKGVVTAGQVRGNSTVLARDVQNPFRYGEIKIHVLKLNKMELLPFHADVEIGQIIEIPIAMYHINKETKEAMAFTDCSHLSLDLNMDKQGVFTLLKEGIQRPGPMHCSSTHIAAKSLGHTLVTVSVNECDKYLESSATFAAYEPLKALNPVEVALVTWQSVKEMVFEGGPRPWILEPSRFFLELNAEKTEKIGIAQVWLPSKRKQNQYIYRIQCLDLGEQVLTFRIGNHPGVLNPSPAVEVLQVRFICAHPASMSVTPVYKVPAGAQPCPLPQHNKWLIPVSRLRDTVLELAVFDQHRRKFDNFSSLMLEWKSSNETLAHFEDYKSVEMVAKDDGSGQTRLHGHQILKVHQIKGTVLIGVNFVGYSEKKSPKEISNLPRSVDVELLLVDDVTVVPENATIYNHPDVKETFSLVEGSGYFLVNSSEQGVVTITYMEAESSVELVPLHPGFFTLEVYDLCLAFLGPATAHLRVSDIQELELDLIDKVEIDKTVLVTVRVLGSSKRPFQNKYFRNMELKLQLASAIVTLTPMEQQDEYSENYILRATTIGQTTLVAIAKDKMGRKYTSTPRHIEVFPPFRLLPEKMTLIPMNMMQVMSEGGPQPQSIVHFSISNQTVAVVNRRGQVTGKIVGTAVVHGTIQTVNEDTGKVIVFSQDEVQIEVVQLRAVRILAAATRLITATKMPVYVMGVTSTQTPFSFSNANPGLTFHWSMSKRDVLDLVPRHSEVFLQLPVEHNFAMVVHTKAAGRTSIKVTVHCMNSSSGQFEGNLLELSDEVQILVFEKLQLFYPECQPEQILMPINSQLKLHTNREGAAFVSSRVLKCFPNSSVIEEDGEGLLKAGSIAGTAVLEVTSIEPFGVNQTTITGVQVAPVTYLRVSSQPKLYTAQGRTLSAFPLGMSLTFTVQFYNSIGEKFHTHNTQLYLALNRDDLLHIGPGNKNYTYMAQAVNRGLTLVGLWDRRHPGMADYIPVAVEHAIEPDTKLTFVGDIICFSTHLVSQHGEPGIWMISANNILQTDIVTGVGVARSPGTAMIFHDIPGVVKTYREVVVNASSRLMLSYDLKTYLTNTLNSTVFKLFITTGRNGVNLKGFCTPNQALAITKVLLPATLMLCHVQFSNTLLDIPASKVFQVHSDFSMEKGVYVCIIKVRPQSEELLQALSVADTSVYGWATLVSERSKNGMQRILIPFIPAFYINQSELVLSHKQDIGEIRVLGVDRVLRKLEVISSSPVLVVAGHSHSPLTPGLAIYSVRVVNFTSFQQMASPVFINISCVLTSQSEAVVVRAMKDKLGADHCEDSAILKRFTGSYQ

SEQ ID NO: 2800 - protein, 740 aa, synthetic construct
  REGION 1..740: note = OSMR (Q99650) SP+PP+ECD
MALFAVFQTTFFLTLLSLRTYQSEVLAERLPLTPVSLKVSTNSTRQSLHLQWTVHNLPYHQELKMVFQIQISRIETSNVIWVGNYSTTVKWNQVLHWSWESELPLECATHFVRIKSLVDDAKFPEPNFWSNWSSWEEVSVQDSTGQDILFVFPKDKLVEEGTNVTICYVSRNIQNNVSCYLEGKQIHGEQLDPHVTAFNLNSVPFIRNKGTNIYCEASQGNVSEGMKGIVLFVSKVLEEPKDFSCETEDFKTLHCTWDPGTDTALGWSKQPSQSYTLFESFSGEKKLCTHKNWCNWQITQDSQETYNFTLIAENYLRKRSVNILFNLTHRVYLMNPFSVNFENVNATNAIMTWKVHSIRNNFTYLCQIELHGEGKMMQYNVSIKVNGEYFLSELEPATEYMARVRCADASHFWKWSEWSGQNFTTLEAAPSEAPDVWRIVSLEPGNHTVTLFWKPLSKLHANGKILFYNVVVENLDKPSSSELHSIPAPANSTKLILDRCSYQICVIANNSVGASPASVIVISADPENKEVEEERIAGTEGGFSLSWKPQPGDVIGYVVDWCDHTQDVLGDFQWKNVGPNTTSTVISTDAFRPGVRYDFRIYGLSTKRIACLLEKKTGYSQELAPSDNPHVLVDTLTSHSFTLSWKDYSTESQPGFIQGYHVYLKSKARQCHPRFEKAVLSDGSECCKYKIDNPEEKALIVDNLKPESFYEFFITPFTSAGEGPSATFTKVTTPDEHSSM

SEQ ID NO: 2801 - protein, 284 aa, synthetic construct
  REGION 1..284: note = OSTM1 (Q86WC4) SP+PP+ECD
MEPGPTAAQRRCSLPPWLPLGLLLWSGLALGALPFGSSPHRVFHDLLSEQQLLEVEDLSLSLLQGGGLGPLSLPPDLPDLDPECRELLLDFANSSAELTGCLVRSARPVRLCQTCYPLFQQVVSKMDNISRAAGNTSESQSCARSLLMADRMQIVVILSEFFNTTWQEANCANCLTNNSEELSNSTVYFLNLFNHTLTCFEHNLQGNAHSLLQTKNYSEVCKNCREAYKTLSSLYSEMQKMNELENKAEPGTHLCIDVEDAMNITRKLWSRTFNCSVPCSDTVP

SEQ ID NO: 2802 - protein, 863 aa, synthetic construct
  REGION 1..863: note = PAM (P19021) SP+PP+ECD
MAGRVPSLLVLLVFPSSCLAFRSPLSVFKRFKETTRPFSNECLGTTRPVVPIDSSDFALDIRMPGVTPKQSDTYFCMSMRIPVDEEAFVIDFKPRASMDTVHHMLLFGCNMPSSTGSYWFCDEGTCTDKANILYAWARNAPPTRLPKGVGFRVGGETGSKYFVLQVHYGDISAFRDNNKDCSGVSLHLTRLPQPLIAGMYLMMSVDTVIPAGEKVVNSDISCHYKNYPMHVFAYRVHTHHLGKVVSGYRVRNGQWTLIGRQSPQLPQAFYPVGHPVDVSFGDLLAARCVFTGEGRTEATHIGGTSSDEMCNLYIMYYMEAKHAVSFMTCTQNVAPDMFRTIPPEANIPIPVKSDMVMMHEHHKETEYKDKIPLLQQPKREEEEVLDQGDFYSLLSKLLGEREDVVHVHKYNPTEKAESESDLVAEIANVVQKKDLGRSDAREGAEHERGNAILVRDRIHKFHRLVSTLRPPESRVFSLQQPPPGEGTWEPEHTGDFHMEEALDWPGVYLLPGQVSGVALDPKNNLVIFHRGDHVWDGNSFDSKFVYQQIGLGPIEEDTILVIDPNNAAVLQSSGKNLFYLPHGLSIDKDGNYWVTDVALHQVFKLDPNNKEGPVLILGRSMQPGSDQNHFCQPTDVAVDPGTGAIYVSDGYCNSRIVQFSPSGKFITQWGEESSGSSPLPGQFTVPHSLALVPLLGQLCVADRENGRIQCFKTDTKEFVREIKHSSFGRNVFAISYIPGLLFAVNGKPHFGDQEPVQGFVMNFSNGEIIDIFKPVRKHFDMPHDIVASEDGTVYIGDAHTNTVWKFTLTEKLEHRSVKKAGIEVQEIKEAEAVVETKMENKPTSSELQKMQEKQKLIKEPGSG

SEQ ID NO: 2803 - protein, 258 aa, synthetic construct
  REGION 1..258: note = PARM1 (Q6UWI2) SP+PP+ECD
MVYKTLFALCILTAGWRVQSLPTSAPLSVSLPTNIVPPTTIWTSSPQNTDADTASPSNGTHNNSVLPVTASAPTSLLPKNISIESREEEITSPGSNWEGTNTDPSPSGFSSTSGGVHLTTTLEEHSSGTPEAGVAATLSQSAAEPPTLISPQAPASSPSSLSTSPPEVFSASVTTNHSSTVTSTQPTGAPTAPESPTEESSSDHTPTSHATAEPVPQEKTPPTTVSGKVMCELIDMETTTTFPRVIMQEVEHALSSGS

SEQ ID NO: 2804 - protein, 852 aa, synthetic construct
  REGION 1..852: note = PCDH1 (Q08174) SP+PP+ECD
MDSGAGGRRCPEAALLILGPPRMEHLRHSPGPGGQRLLLPSMLLALLLLLAPSPGHATRVVYKVPEEQPPNTLIGSLAADYGFPDVGHLYKLEVGAPYLRVDGKTGDIFTTETSIDREGLRECQNQLPGDPCILEFEVSITDLVQNGSPRLLEGQIEVQDINDNTPNFASPVITLAIPENTNIGSLFPIPLASDRDAGPNGVASYELQAGPEAQELFGLQVAEDQEEKQPQLIVMGNLDRERWDSYDLTIKVQDGGSPPRASSALLRVTVLDTNDNAPKFERPSYEAELSENSPIGHSVIQVKANDSDQGANAEIEYTFHQAPEVVRRLLRLDRNTGLITVQGPVDREDLSTLRFSVLAKDRGTNPKSARAQVVVTVKDMNDNAPTIEIRGIGLVTHQDGMANISEDVAEETAVALVQVSDRDEGENAAVTCVVAGDVPFQLRQASETGSDSKKKYFLQTTTPLDYEKVKDYTIEIVAVDSGNPPLSSTNSLKVQVVDVNDNAPVFTQSVTEVAFPENNKPGEVIAEITASDADSGSNAELVYSLEPEPAAKGLFTISPETGEIQVKTSLDREQRESYELKVVAADRGSPSLQGTATVLVNVLDCNDNDPKFMLSGYNFSVMENMPALSPVGMVTVIDGDKGENAQVQLSVEQDNGDFVIQNGTGTILSSLSFDREQQSTYTFQLKAVDGGVPPRSAYVGVTINVLDENDNAPYITAPSNTSHKLLTPQTRLGETVSQVAAEDFDSGVNAELIYSIAGGNPYGLFQIGSHSGAITLEKEIERRHHGLHRLVVKVSDRGKPPRYGTALVHLYVNETLANRTLLETLLGHSLDTPLDIDIAGDPEYERSKQRGN

SEQ ID NO: 2805 - protein, 715 aa, synthetic construct
  REGION 1..715: note = PCDH10 (Q9P2E7) SP+PP+ECD
MIVLLLFALLWMVEGVFSQLHYTVQEEQEHGTFVGNIAEDLGLDITKLSARGFQTVPNSRTPYLDLNLETGVLYVNEKIDREQICKQSPSCVLHLEVFLENPLELFQVEIEVLDINDNPPSFPEPDLTVEISESATPGTRFPLESAFDPDVGTNSLRDYEITPNSYFSLDVQTQGDGNRFAELVLEKPLDREQQAVHRYVLTAVDGGGGGGVGEGGGGGGGAGLPPQQQRTGTALLTIRVLDSNDNVPAFDQPVYTVSLPENSPPGTLVIQLNATDPDEGQNGEVVYSFSSHISPRARELFGLSPRTGRLEVSGELDYEESPVYQVYVQAKDLGPNAVPAHCKVLVRVLDANDNAPEISFSTVKEAVSEGAAPGTVVALFSVTDRDSEENGQVQCELLGDVPFRLKSSFKNYYTIVTEAPLDREAGDSYTLTVVARDRGEPALSTSKSIQVQVSDVNDNAPRFSQPVYDVYVTENNVPGAYIYAVSATDRDEGANAQLAYSILECQIQGMSVFTYVSINSENGYLYALRSFDYEQLKDFSFQVEARDAGSPQALAGNATVNILIVDQNDNAPAIVAPLPGRNGTPAREVLPRSAEPGYLLTRVAAVDADDGENARLTYSIVRGNEMNLFRMDWRTGELRTARRVPAKRDPQRPYELVIEVRDHGQPPLSSTATLVVQLVDGAVEPQGGGGSGGGGSGEHQRPSRSGGGETSLDLT

SEQ ID NO: 2806 - protein, 812 aa, synthetic construct
  REGION 1..812: note = PCDH11X (Q9BZA7) SP+PP+ECD
MDLLSGTYIFAVLLACVVFHSGAQEKNYTIREEMPENVLIGDLLKDLNLSLIPNKSLTTAMQFKLVYKTGDVPLIRIEEDTGEIFTTGARIDREKLCAGIPRDEHCFYEVEVAILPDEIFRLVKIRFLIEDINDNAPLFPATVINISIPENSAINSKYTLPAAVDPDVGINGVQNYELIKSQNIFGLDVIETPEGDKMPQLIVQKELDREEKDTYVMKVKVEDGGFPQRSSTAILQVSVTDTNDNHPVFKETEIEVSIPENAPVGTSVTQLHATDADIGENAKIHFSFSNLVSNIARRLFHLNATTGLITIKEPLDREETPNHKLLVLASDGGLMPARAMVLVNVTDVNDNVPSIDIRYIVNPVNDTVVLSENIPLNTKIALITVTDKDADHNGRVTCFTDHEIPFRLRPVFSNQFLLETAAYLDYESTKEYAIKLLAADAGKPPLNQSAMLFIKVKDENDNAPVFTQSFVTVSIPENNSPGIQLTKVSAMDADSGPNAKINYLLGPDAPPEFSLDCRTGMLTVVKKLDREKEDKYLFTILAKDNGVPPLTSNVTVFVSIIDQNDNSPVFTHNEYNFYVPENLPRHGTVGLITVTDPDYGDNSAVTLSILDENDDFTIDSQTGVIRPNISFDREKQESYTFYVKAEDGGRVSRSSSAKVTINVVDVNDNKPVFIVPPSNCSYELVLPSTNPGTVVFQVIAVDNDTGMNAEVRYSIVGGNTRDLFAIDQETGNITLMEKCDVTDLGLHRVLVKANDLGQPDSLFSVVIVNLFVNESVTNATLINELVRKSTEAPVTPNTEIADVSSPTSDYVK

SEQ ID NO: 2807 - protein, 844 aa, synthetic construct
  REGION 1..844: note = PCDH11Y (Q9BZA8) SP+PP+ECD
MFRVGFLIISSSSSLSPLLLVSVVRVNTTNCHKCLLSGTYIFAVLLVCVVFHSGAQEKNYTIREEIPENVLIGNLLKDLNLSLIPNKSLTTTMQFKLVYKTGDVPLIRIEEDTGEIFTTGARIDREKLCAGIPRDEHCFYEVEVAILPDEIFRLVKIRFLIEDINDNAPLFPATVINISIPENSAINSKYTLPAAVDPDVGINGVQNYELIKSQNIFGLDVIETPEGDKMPQLIVQKELDREEKDTYVMKVKVEDGGFPQRSSTAILQVSVTDTNDNHPVFKETEIEVSIPENAPVGTSVTQLHATDADIGENAKIHFSFSNLVSNIARRLFHLNATTGLITIKEPLDREETPNHKLLVLASDGGLMPARAMVLVNVTDVNDNVPSIDIRYIVNPVNDTVVLSENIPLNTKIALITVTDKDADHNGRVTCFTDHEIPFRLRPVFSNQFLLENAAYLDYESTKEYAIKLLAADAGKPPLNQSAMLFIKVKDENDNAPVFTQSFVTVSIPENNSPGIQLMKVSATDADSGPNAEINYLLGPDAPPEFSLDRRTGMLTVVKKLDREKEDKYLFTILAKDNGVPPLTSNVTVFVSIIDQNDNSPVFTHNEYKFYVPENLPRHGTVGLITVTDPDYGDNSAVTLSILDENDDFTIDSQTGVIRPNISFDREKQESYTFYVKAEDGGRVSRSSSAKVTINVVDVNDNKPVFIVPPYNYSYELVLPSTNPGTVVFQVIAVDNDTGMNAEVRYSIVGGNTRDLFAIDQETGNITLMEKCDVTDLGLHRVLVKANDLGQPDSLFSVVIVNLFVNESVTNATLINELVRKSIEAPVTPNTEIADVSSPTSDYVK

SEQ ID NO: 2808 - protein, 718 aa, synthetic construct
  REGION 1..718: note = PCDH12 (Q9NPG4) SP+PP+ECD
MMQLLQLLLGLLGPGGYLFLLGDCQEVTTLTVKYQVSEEVPSGTVIGKLSQELGREERRRQAGAAFQVLQLPQALPIQVDSEEGLLSTGRRLDREQLCRQWDPCLVSFDVLATGDLALIHVEIQVLDINDHQPRFPKGEQELEISESASLRTRIPLDRALDPDTGPNTLHTYTLSPSEHFALDVIVGPDETKHAELIVVKELDREIHSFFDLVLTAYDNGNPPKSGTSLVKVNVLDSNDNSPAFAESSLALEIQEDAAPGTLLIKLTATDPDQGPNGEVEFFLSKHMPPEVLDTFSIDAKTGQVILRRPLDYEKNPAYEVDVQARDLGPNPIPAHCKVLIKVLDVNDNIPSIHVTWASQPSLVSEALPKDSFIALVMADDLDSGHNGLVHCWLSQELGHFRLKRTNGNTYMLLTNATLDREQWPKYTLTLLAQDQGLQPLSAKKQLSIQISDINDNAPVFEKSRYEVSTRENNLPSLHLITIKAHDADLGINGKVSYRIQDSPVAHLVAIDSNTGEVTAQRSLNYEEMAGFEFQVIAEDSGQPMLASSVSVWVSLLDANDNAPEVVQPVLSDGKASLSVLVNASTGHLLVPIETPNGLGPAGTDTPPLATHSSRPFLLTTIVARDADSGANGEPLYSIRSGNEAHLFILNPHTGQLFVNVTNASSLIGSEWELEIVVEDQGSPPLQTRALLRVMFVTSVDHLRDSARKPGALSMSMLT

SEQ ID NO: 2809 - protein, 1376 aa, synthetic construct
  REGION 1..1376: note = PCDH15 (Q96QU1) SP+PP+ECD
MFRQFYLWTCLASGIILGSLFEICLGQYDDDCKLARGGPPATIVAIDEESRNGTILVDNMLIKGTAGGPDPTIELSLKDNVDYWVLMDPVKQMLFLNSTGRVLDRDPPMNIHSIVVQVQCINKKVGTIIYHEVRIVVRDRNDNSPTFKHESYYATVNELTPVGTTIFTGFSGDNGATDIDDGPNGQIEYVIQYNPDDPTSNDTFEIPLMLTGNIVLRKRLNYEDKTRYFVIIQANDRAQNLNERRTTTTTLTVDVLDGDDLGPMFLPCVLVPNTRDCRPLTYQAAIPELRTPEELNPIIVTPPIQAIDQDRNIQPPSDRPGILYSILVGTPEDYPRFFHMHPRTAELSLLEPVNRDFHQKFDLVIKAEQDNGHPLPAFAGLHIEILDENNQSPYFTMPSYQGYILESAPVGATISDSLNLTSPLRIVALDKDIEDTKDPELHLFLNDYTSVFTVTQTGITRYLTLLQPVDREEQQTYTFSITAFDGVQESEPVIVNIQVMDANDNTPTFPEISYDVYVYTDMRPGDSVIQLTAVDADEGSNGEITYEILVGAQGDFIINKTTGLITIAPGVEMIVGRTYALTVQAADNAPPAERRNSICTVYIEVLPPNNQSPPRFPQLMYSLEISEAMRVGAVLLNLQATDREGDSITYAIENGDPQRVFNLSETTGILTLGKALDRESTDRYILIITASDGRPDGTSTATVNIVVTDVNDNAPVFDPYLPRNLSVVEEEANAFVGQVKATDPDAGINGQVHYSLGNFNNLFRITSNGSIYTAVKLNREVRDYYELVVVATDGAVHPRHSTLTLAIKVLDIDDNSPVFTNSTYTVLVEENLPAGTTILQIEAKDVDLGANVSYRIRSPEVKHFFALHPFTGELSLLRSLDYEAFPDQEASITFLVEAFDIYGTMPPGIATVTVIVKDMNDYPPVFSKRIYKGMVAPDAVKGTPITTVYAEDADPPGLPASRVRYRVDDVQFPYPASIFEVEEDSGRVITRVNLNEEPTTIFKLVVVAFDDGEPVMSSSATVKILVLHPGEIPRFTQEEYRPPPVSELATKGTMVGVISAAAINQSIVYSIVSGNEEDTFGINNITGVIYVNGPLDYETRTSYVLRVQADSLEVVLANLRVPSKSNTAKVYIEIQDENNHPPVFQKKFYIGGVSEDARMFTSVLRVKATDKDTGNYSVMAYRLIIPPIKEGKEGFVVETYTGLIKTAMLFHNMRRSYFKFQVIATDDYGKGLSGKADVLVSVVNQLDMQVIVSNVPPTLVEKKIEDLTEILDRYVQEQIPGAKVVVESIGARRHGDAFSLEDYTKCDLTVYAIDPQTNRAIDRNELFKFLDGKLLDINKDFQPYYGEGGRILEIRTPEAVTSIKKRGESLGYTEGA

SEQ ID NO: 2810 - protein, 707 aa, synthetic construct
  REGION 1..707: note = PCDH17 (O14917) SP+PP+ECD
MYLSICCCFLLWAPALTLKNLNYSVPEEQGAGTVIGNIGRDARLQPGLPPAERGGGGRSKSGSYRVLENSAPHLLDVDADSGLLYTKQRIDRESLCRHNAKCQLSLEVFANDKEICMIKVEIQDINDNAPSFSSDQIEMDISENAAPGTRFPLTSAHDPDAGENGLRTYLLTRDDHGLFGLDVKSRGDGTKFPELVIQKALDREQQNHHTLVLTALDGGEPPRSATVQINVKVIDSNDNSPVFEAPSYLVELPENAPLGTVVIDLNATDADEGPNGEVLYSFSSYVPDRVRELFSIDPKTGLIRVKGNLDYEENGMLEIDVQARDLGPNPIPAHCKVTVKLIDRNDNAPSIGFVSVRQGALSEAAPPGTVIALVRVTDRDSGKNGQLQCRVLGGGGTGGGGGLGGPGGSVPFKLEENYDNFYTVVTDRPLDRETQDEYNVTIVARDGGSPPLNSTKSFAIKILDENDNPPRFTKGLYVLQVHENNIPGEYLGSVLAQDPDLGQNGTVSYSILPSHIGDVSIYTYVSVNPTNGAIYALRSFNFEQTKAFEFKVLAKDSGAPAHLESNATVRVTVLDVNDNAPVIVLPTLQNDTAELQVPRNAGLGYLVSTVRALDSDFGESGRLTYEIVDGNDDHLFEIDPSSGEIRTLHPFWEDVTPVVELVVKVTDHGKPTLSAVAKLIIRSVSGSLPEGVPRVNGEQHHWDMSLP

SEQ ID NO: 2811 - protein, 699 aa, synthetic construct
  REGION 1..699: note = PCDH18 (Q9HCL0) SP+PP+ECD
MHQMNAKMHFRFVFALLIVSFNHDVLGKNLKYRIYEEQRVGSVIARLSEDVADVLLKLPNPSTVRFRAMQRGNSPLLVVNEDNGEISIGATIDREQLCQKNLNCSIEFDVITLPTEHLQLFHIEVEVLDINDNSPQFSRSLIPIEISESAAVGTRIPLDSAFDPDVGENSLHTYSLSANDFFNIEVRTRTDGAKYAELIVVRELDRELKSSYELQLTASDMGVPQRSGSSILKISISDSNDNSPAFEQQSYIIQLLENSPVGTLLLDLNATDPDEGANGKIVYSFSSHVSPKIMETFKIDSERGHLTLFKQVDYEITKSYEIDVQAQDLGPNSIPAHCKIIIKVVDVNDNKPEININLMSPGKEEISYIFEGDPIDTFVALVRVQDKDSGLNGEIVCKLHGHGHFKLQKTYENNYLILTNATLDREKRSEYSLTVIAEDRGTPSLSTVKHFTVQINDINDNPPHFQRSRYEFVISENNSPGAYITTVTATDPDLGENGQVTYTILESFILGSSITTYVTIDPSNGAIYALRIFDHEEVSQITFVVEARDGGSPKQLVSNTTVVLTIIDENDNVPVVIGPALRNNTAEITIPKGAESGFHVTRIRAIDRDSGVNAELSCAIVAGNEENIFIIDPRSCDIHTNVSMDSVPYTEWELSVIIQDKGNPQLHTKVLLKCMIFEYAESVTSTAMTSVSQASLDVS

SEQ ID NO: 2812 - protein, 678 aa, synthetic construct
  REGION 1..678: note = PCDH19 (Q8TAB3) SP+PP+ECD
MESLLLPVLLLLAILWTQAAALINLKYSVEEEQRAGTVIANVAKDAREAGFALDPRQASAFRVVSNSAPHLVDINPSSGLLVTKQKIDRDLLCRQSPKCIISLEVMSSSMEICVIKVEIKDLNDNAPSFPAAQIELEISEAASPGTRIPLDSAYDPDSGSFGVQTYELTPNELFGLEIKTRGDGSRFAELVVEKSLDRETQSHYSFRITALDGGDPPRLGTVGLSIKVTDSNDNNPVFSESTYAVSVPENSPPNTPVIRLNASDPDEGTNGQVVYSFYGYVNDRTRELFQIDPHSGLVTVTGALDYEEGHVYELDVQAKDLGPNSIPAHCKVTVSVLDTNDNPPVINLLSVNSELVEVSESAPPGYVIALVRVSDRDSGLNGRVQCRLLGNVPFRLQEYESFSTILVDGRLDREQHDQYNLTIQARDGGVPMLQSAKSFTVLITDENDNHPHFSKPYYQVIVQENNTPGAYLLSVSARDPDLGLNGSVSYQIVPSQVRDMPVFTYVSINPNSGDIYALRSFNHEQTKAFEFKVLAKDGGLPSLQSNATVRVIILDVNDNTPVITAPPLINGTAEVYIPRNSGIGYLVTVVKAEDYDEGENGRVTYDMTEGDRGFFEIDQVNGEVRTTRTFGESSKSSYELIVVAHDHGKTSLSASALVLIYLSPALDAQESMGSVNLS

SEQ ID NO: 2813 - protein, 890 aa, synthetic construct
  REGION 1..890: note = PCDH20 (Q8N6Y1) SP+PP+ECD
MRGRGNARSSQALGVSWCPATWHPRLDMGRLHRPRSSTSYRNLPHLFLFFLFVGPFSCLGSYSRATELLYSLNEGLPAGVLIGSLAEDLRLLPRSAGRPDPQSQLPERTGAEWNPPLSFSLASRGLSGQYVTLDNRSGELHTSAQEIDREALCVEGGGGTAWSGSVSISSSPSDSCLLLLDVLVLPQEYFRFVKVKIAIRDINDNAPQFPVSQISVWVPENAPVNTRLAIEHPAVDPDVGINGVQTYRLLDYHGMFTLDVEENENGERTPYLIVMGALDRETQDQYVSIIIAEDGGSPPLLGSATLTIGISDINDNCPLFTDSQINVTVYGNATVGTPIAAVQAVDKDLGTNAQITYSYSQKVPQASKDLFHLDENTGVIKLFSKIGGSVLESHKLTILANGPGCIPAVITALVSIIKVIFRPPEIVPRYIANEIDGVVYLKELEPVNTPIAFFTIRDPEGKYKVNCYLDGEGPFRLSPYKPYNNEYLLETTKPMDYELQQFYEVAVVAWNSEGFHVKRVIKVQLLDDNDNAPIFLQPLIELTIEENNSPNAFLTKLYATDADSEERGQVSYFLGPDAPSYFSLDSVTGILTVSTQLDREEKEKYRYTVRAVDCGKPPRESVATVALTVLDKNDNSPRFINKDFSFFVPENFPGYGEIGVISVTDADAGRNGWVALSVVNQSDIFVIDTGKGMLRAKVSLDREQQSSYTLWVEAVDGGEPALSSTAKITILLLDINDNPPLVLFPQSNMSYLLVLPSTLPGSPVTEVYAVDKDTGMNAVIAYSIIGRRGPRPESFRIDPKTGNITLEEALLQTDYGLHRLLVKVSDHGYPEPLHSTVMVNLFVNDTVSNESYIESLLRKEPEINIEEKEPQISIEPTHRKVESVSCMPTL

SEQ ID NO: 2814 - protein, 879 aa, synthetic construct
  REGION 1..879: note = PCDH7 (O60245) SP+PP+ECD
MLRMRTAGWARGWCLGCCLLLPLSLSLAAAKQLLRYRLAEEGPADVRIGNVASDLGIVTGSGEVTFSLESGSEYLKIDNLTGELSTSERRIDREKLPQCQMIFDENECFLDFEVSVIGPSQSWVDLFEGQVIVLDINDNTPTFPSPVLTLTVEENRPVGTLYLLPTATDRDFGRNGIERYELLQEPGGGGSGGESRRAGAADSAPYPGGGGNGASGGGSGGSKRRLDASEGGGGTNPGGRSSVFELQVADTPDGEKQPQLIVKGALDREQRDSYELTLRVRDGGDPPRSSQAILRVLITDVNDNSPRFEKSVYEADLAENSAPGTPILQLRAADLDVGVNGQIEYVFGAATESVRRLLRLDETSGWLSVLHRIDREEVNQLRFTVMARDRGQPPKTDKATVVLNIKDENDNVPSIEIRKIGRIPLKDGVANVAEDVLVDTPIALVQVSDRDQGENGVVTCTVVGDVPFQLKPASDTEGDQNKKKYFLHTSTPLDYEATREFNVVIVAVDSGSPSLSSNNSLIVKVGDTNDNPPMFGQSVVEVYFPENNIPGERVATVLATDADSGKNAEIAYSLDSSVMGIFAIDPDSGDILVNTVLDREQTDRYEFKVNAKDKGIPVLQGSTTVIVQVADKNDNDPKFMQDVFTFYVKENLQPNSPVGMVTVMDADKGRNAEMSLYIEENNNIFSIENDTGTIYSTMSFDREHQTTYTFRVKAVDGGDPPRSATATVSLFVMDENDNAPTVTLPKNISYTLLPPSSNVRTVVATVLATDSDDGINADLNYSIVGGNPFKLFEIDPTSGVVSLVGKLTQKHYGLHRLVVQVNDSGQPSQSTTTLVHVFVNESVSNATAIDSQIARSLHIPLTQDIAGDPSYEISKQRLS

SEQ ID NO: 2815 - protein, 749 aa, synthetic construct
  REGION 1..749: note = PCDH8 (O95206) SP+PP+ECD
MSPVRRWGSPCLFPLQLFSLCWVLSVAQSKTVRYSTFEEDAPGTVIGTLAEDLHMKVSGDTSFRLMKQFNSSLLRVREGDGQLTVGDAGLDRERLCGQAPQCVLAFDVVSFSQEQFRLVHVEVEVRDVNDHAPRFPRAQIPVEVSEGAAVGTRIPLEVPVDEDVGANGLQTVRLAEPHSPFRVELQTRADGAQCADLVLLQELDRESQAAYSLELVAQDGGRPPRSATAALSVRVLDANDHSPAFPQGAVAEVELAEDAPVGSLLLDLDAADPDEGPNGDVVFAFGARTPPEARRLFRLDPRSGRLTLAGPVDYERQDTYELDVRAQDRGPGPRAATCKVIVRIRDVNDNAPDIAITPLAAPGAPATSPFAAAAAAAALGGADASSPAGAGTPEAGATSLVPEGAARESLVALVSTSDRDSGANGQVRCALYGHEHFRLQPAYAGSYLVVTAASLDRERIAEYNLTLVAEDRGAPPLRTVRPYTVRVGDENDNAPLFTRPVYEVSVRENNPPGAYLATVAARDRDLGRNGQVTYRLLEAEVGRAGGAVSTYVSVDPATGAIYALRSFDYETLRQLDVRIQASDGGSPQLSSSALVQVRVLDQNDHAPVLVHPAPANGSLEVAVPGRTAKDTVVARVQARDADEGANGELAFELQQQEPREAFAIGRRTGEILLTGDLSQEPPGRVFRALLVISDGGRPPLTTTATVSFVVTAGGGRGPAAPASAGSPERSRPPGSRLGVSGSVLQWDTP

SEQ ID NO: 2816 - protein, 814 aa, synthetic construct
  REGION 1..814: note = PCDH9 (Q9HC56) SP+PP+ECD
MDLRDFYLLAALIACLRLDSAIAQELIYTIREELPENVPIGNIPKDLNISHINAATGTSASLVYRLVSKAGDAPLVKVSSSTGEIFTTSNRIDREKLCAGASYAEENECFFELEVVILPNDFFRLIKIKIIVKDTNDNAPMFPSPVINISIPENTLINSRFPIPSATDPDTGFNGVQHYELLNGQSVFGLDIVETPEGEKWPQLIVQQNLDREQKDTYVMKIKVEDGGTPQKSSTAILQVTVSDVNDNRPVFKEGQVEVHIPENAPVGTSVIQLHATDADIGSNAEIRYIFGAQVAPATKRLFALNNTTGLITVQRSLDREETAIHKVTVLASDGSSTPARATVTINVTDVNDNPPNIDLRYIISPINGTVYLSEKDPVNTKIALITVSDKDTDVNGKVICFIEREVPFHLKAVYDNQYLLETSSLLDYEGTKEFSFKIVASDSGKPSLNQTALVRVKLEDENDNPPIFNQPVIELSVSENNRRGLYLTTISATDEDSGKNADIVYQLGPNASFFDLDRKTGVLTASRVFDREEQERFIFTVTARDNGTPPLQSQAAVIVTVLDENDNSPKFTHNHFQFFVSENLPKYSTVGVITVTDADAGENKAVTLSILNDNDNFVLDPYSGVIKSNVSFDREQQSSYTFDVKATDGGQPPRSSTAKVTINVMDVNDNSPVVISPPSNTSFKLVPLSAIPGSVVAEVFAVDVDTGMNAELKYTIVSGNNKGLFRIDPVTGNITLEEKPAPTDVGLHRLVVNISDLGYPKSLHTLVLVFLYVNDTAGNASYIYDLIRRTMETPLDRNIGDSSQPYQNEDYLT

SEQ ID NO: 2817 - protein, 697 aa, synthetic construct
  REGION 1..697: note = PCDHA1 (Q9Y5I3) SP+PP+ECD
MVFSRRGGLGARDLLLWLLLLAAWEVGSGQLHYSIPEEAKHGTFVGRVAQDLGLELAELVPRLFRVASKTHRDLLEVNLQNGILFVNSRIDREELCQWSAECSIHLELIADRPLQVFHVEVKVKDINDNPPVFRGREQIIFIPESRLLNSRFPIEGAADADIGANALLTYTLSPSDYFSLDVEASDELSKSLWLELRKYLDREETPELHLLLTATDGGKPELQGTVELLITVLDVNDNAPLFDQAVYRVHLLETTANGTLVTTLNASDADEGVNGEVVFSFDSGISRDIQEKFKVDSSSGEIRLIDKLDYEETKSYEIQVKAVDKGSPPMSNHCKVLVKVLDVNDNAPELAVTSLYLPIREDAPLSTVIALITVSDRDSGANGQVTCSLMPHVPFKLVSTFKNYYSLVLDSALDRESLSVYELVVTARDGGSPSLWATARVSVEVADVNDNAPAFAQPEYTVFVKENNPPGCHIFTVSARDADAQENALVSYSLVERRVGERALSNYVSVHAESGKVYALQPLDHEELELLQFQVSARDAGVPPLGSNVTLQVFVLDENDNAPALLAPRVGGTIGAVSELVPRLVGAGHVVAKVRAVDADSGYNAWLSYELQPAAGGARIPFRVGLYTGEISTTRVLDEADLSRYRLLVLVKDHGEPALTATATVLVSLVESGQAPKASSRASVGVAGPEAALVDVN

SEQ ID NO: 2818 - protein, 695 aa, synthetic construct
  REGION 1..695: note = PCDHA10 (Q9Y5I2) SP+PP+ECD
MVSRCSCLGVQCLLLSLLLLAAWEVGSGQLHYSVYEEARHGTFVGRIAQDLGLELAELVQRLFRVASKRHGDLLEVNLQNGILFVNSRIDREELCGRSVECSIHLEVIVDRPLQVFHVDVEVKDINDNPPRFSVTEQKLSIPESRLLDSRFPLEGASDADVGENALLTYKLSPNEYFVLDIINKKDKDKFPVLVLRKLLDREENPQLKLLLTATDGGKPEFTGSVSLLILVLDANDNAPIFDRPVYEVKMYENQVNQTLVIRLNASDSDEGINKEMMYSFSSLVPPTIRRKFWINERTGEIKVNDAIDFEDSNTYEIHVDVTDKGNPPMVGHCTVLVELLDENDNSPEVIVTSLSLPVKEDAQVGTVIALISVSDHDSGANGQVTCSLTPHVPFKLVSTYKNYYSLVLDSALDRERVSAYELVVTARDGGSPPLWATASVSVEVADVNDNAPAFAQSEYTVFVKENNPPGCHIFTVSAWDADAQENALVSYSLVERRLGERSLSSYVSVHAESGKVYALQPLDHEELELLQFQVSARDGGVPPLGSNLTLQVFVLDENDNAPALLASPAGSAGGAVSELVLRSVVAGHVVAKVRAVDADSGYNAWLSYELQSAAVGARIPFRVGLYTGEISTTRALDETDSPRQRLLVLVKDHGEPSLTATATVLVSLVEGSQAPKASSRASVGVAPEVALVDVN

SEQ ID NO: 2819 - protein, 696 aa, synthetic construct
  REGION 1..696: note = PCDHA11 (Q9Y5I1) SP+PP+ECD
MFGFQRRGLGTPRLQLWLLLLEFWEVGSGQLHYSVSEEAKHGTFVGRIAQDLGLELAELVQRLFRVASKTHGDLLEVNLQNGILFVNSRIDREELCGQSAECSIHLEVIVDRPLQVFHVNVEVKDINDNPPVFSLREQKLLIAESKQSDSRFPLEGASDADIEENALLTYRLSKNEYFSLDSPTNGKQIKRLSLILKKSLDREKTPELNLLLTATDGGKPELTGTVRLLVQVLDVNDNDPEFDKSEYKVSLMENAAKETLVLKLNATDRDEGVNGEVTYSLMSIKPNGRHLFTLDQNNGEVRVNGTLDYEENKFYKIEVQATDKGTPPMAGHCTVWVEILDTNDNSPEVAVTSLSLPVREDAQPSTVIALISVSDRDSGVNGQVTCSLTPHVPFKLVSTFKNYYSLVLDSALDRENVWAYELVVTARDGGSPSLWATARVSVEVADVNDNAPAFAQPEYTVFVKENNPPGCHIFTVSARDADAQENALVSYSLVERRLGDRALSSYVSVHAESGKVYALQPLDHEELELLQFQVSARDAGVPPLSSNVTLQVFVLDENDNAPALLATQAGSAGGAVNKLVPRSVGAGHVVAKVRAVDADSGYNAWLSYELQPAAGGSRIPFRVGLYTGEISTTRALDEADSPRHRLLVLVKDHGEPALTATATVLVSLVESGQAPKASSRTLAGAASPEAALVDVN

SEQ ID NO: 2820 - protein, 697 aa, synthetic construct
  REGION 1..697: note = PCDHA12 (Q9UN75) SP+PP+ECD
MVIIGPRGPGSQRLLLSLLLLAAWEVGSGQLHYSVYEEAKHGTFVGRIAQDLGLELAELVPRLFRVASKRHGDLLEVNLQNGILFVNSRIDREKLCGRSAECSIHLEVIVDRPLQVFHVDVEVKDINDNPPVFREREQKVPVSESAPLDSHFPLEGASDADIGVNSLLTYALSLNENFELKIKTKKDKSILPELVLRKLLDREQTPKLNLLLMVIDGGKPELTGSVQIQITVLDVNDNGPAFDKPSYKVVLSENVQNDTRVIQLNASDPDEGLNGEISYGIKMILPVSEKCMFSINPDTGEIRIYGELDFEENNAYEIQVNAIDKGIPSMAGHSMVLVEVLDVNDNVPEVMVTSLSLPVQEDAQVGTVIALISVSDRDSGANGQVICSLTPHVPFKLVSTYKNYYSLVLDSALDRESVSAYELVVTARDGGSPSLWATARVSVEVADVNDNAPAFAQPEYTVFVKENNPPGCHIFTVSAWDADAQKNALVSYSLVERRVGEHALSSYVSVHAESGKVYALQPLDHEELELLQFQVSARDAGVPPLGSNVTLQVFVLDENDNAPALLATPAGSAGGAVSELVPRSVGAGHVVAKVRAVDADSGYNAWLSYELQPAAVGAHIPFHVGLYTGEISTTRILDEADAPRHRLLVLVKDHGEPALTSTATVLVSLVENGQAPKTSSRASVGAVDPEAALVDIN

SEQ ID NO: 2821 - protein, 697 aa, synthetic construct
  REGION 1..697: note = PCDHA13 (Q9Y5I0) SP+PP+ECD
MLSSWQGGPRPRQLLLWLLILAAWETGSGQLHYSVPEEAKHGTFVGRIAQDLGLELAELVPRLFRVASKRHGDLLEVNLQNGILFVNSRIDREELCGRSAECSIHLEVIVDRPLQVFHVEVKVRDINDNPPIFPESKKRIIIAESRPPETRFPLDGASDADIGVNSALTYRLDPNDYFTLDAQNSLEQMSSLSLVLRKTLDREEIQEHSLLLTASDGGKPELTGTVQLLITILDVNDNAPEFYQSVYKVTVLENAFNGTLVIKLNATDPDDGTNGDIVYSFRRPVWPAVVYAFTINPNNGEIRTKGKLDFEEKKLYEISVEAVDKGNIPMAGHCTLLVEVLDVNDNAPEVTITSLSLPIREDTQPSAIIALISVSDRDSGSNGQVTCTLTPHVPFKLVSTYKNYYSLVLDSALDRESVSAYELVVTARDGGSPSLWATASVSVGVADVNDNAPAFAQPEYTVFVKENNPPGCHIFTVSAQDADAQENALVSYSLVERRVGERALSSYVSVHAESGKVYALQPLDHEELELLQFQVSARDSGVPPLGSNVTLQVFVLDENDNAPALLTPGAGSAGGTVSELMPRSVGAGHVVAKVRAVDADSGYNAWLSYELQLAAVGARIPFRVGLYTGEISTTRPLDEVDAPHHRLLVLVKDHGEPALTATATVLLSLVESGQAPQASSRASAGAVGPEAALVDVN

SEQ ID NO: 2822 - protein, 697 aa, synthetic construct
  REGION 1..697: note = PCDHA2 (Q9Y5H9) SP+PP+ECD
MASSIRRGRGAWTRLLSLLLLAAWEVGSGQLRYSVPEEAKHGTFVGRIAQDLGLELEELVPRLFRVASKRHGDLLEVNLQNGILFVNSRIDREELCGRSAECSIHVEVIVDRPLQVFHVEVEVKDINDNPPIFPMTVKTIRFPESRLLDSRFPLEGASDADIGVNALLSYKLSSSEFFFLDIQANDELSESLSLVLGKSLDREETAEVNLLLVATDGGKPELTGTVQILIKVLDVNDNEPTFAQSVYKVKLLENTANGTLVVKLNASDADEGPNSEIVYSLGSDVSSTIQTKFTIDPISGEIRTKGKLDYEEAKSYEIQVTATDKGTPSMSGHCKISLKLVDINDNTPEVSITSLSLPISENASLGTVIALITVSDRDSGTNGHVTCSLTPHVPFKLVSTFKNYYSLVLDSALDRESVSAYELVVTARDGGSPSLWATTSVSIEVADVNDNAPAFAQPEYTVFVKENNPPGCHIFTVSAWDADAQENALVSYSLVERRVGERALSSYVSVHAESGKVYALQPLDHEEVELLQFQVSARDAGVPPLGSNVTLQVFVLDENDNAPALLAPRAGTAAGAVSELVPWSVGAGHVVAKVRAVDADSGYNAWLSYELQLGTGSARIPFRVGLYTGEISTTRALDEADSPRHRLLVLVKDHGEPALTATATVLVSLVESGQAPKASSRAWVGAAGSEATLVDVN

SEQ ID NO: 2823 - protein, 697 aa, synthetic construct
  REGION 1..697: note = PCDHA3 (Q9Y5H8) SP+PP+ECD
MLFSWREDPGAQCLLLSLLLLAASEVGSGQLHYSVSEEAKHGTFVGRIAQDLGLELAELVPRLFRVASKRHGDLLEVNLQNGILFVNSRIDREELCGRSAECSIHLEVIVDRPLQVFHVEVEVKDINDNAPVFPMAVKNLFISESRQPGSRFSLEGASDADIGTNSLLTYSLDSTEYFTLDVKRNDEEIKSLGLVLKKNLNREDTPKHYLLITAIDGGKPELTGTTQLKITVLDVNDNAPAFERTIYKVRLLENAPNGTLVVTVNATDLDEGVNKDIAYSFNTDMSADILSKFHLDPVNGQISVKGNIDFEESKSYEIQVEATDKGNPPMSDHCTVLLEIVDINDNVPELVIQSLSLPVLEDSPLSTVIALISVSDRDSGVNGQVTCSLTPHVPFKLVSTFKNYYSLVLDSPLDRESVSAYELVVTARDGGSPSLWATASVSVEVADVNDNAPAFSQSEYTVFVKENNPPGCHIFTVSARDADAQENALVSYSLVERRVGERALSSYVSVHAESGKVYALQPLDHEELELLQFQVSARDAGVPPLGSNVTLQVFVLDENDNAPALLMPRVGGIGGAVSELVPRSVGAGHVVAKVRAVDADSGYNAWLSYELQPGTGGARIPFRVGLYTGEISTTRALDEVDAPRHRLLVLVKDHGEPSLTATATVLVSLVESGQAPKASSQASAGATGPEAALVDVN

SEQ ID NO: 2824 - protein, 697 aa, synthetic construct
  REGION 1..697: note = PCDHA4 (Q9UN74) SP+PP+ECD
MEFSWGSGQESRRLLLLLLLLAAWEAGNGQLHYSVSEEAKHGTFVGRIAQDLGLELAELVPRLFRVASKGRGGLLEVNLQNGILFVNSRIDREELCRRSAECSIHLEVIVDRPLQVFHVDVEVRDINDNPPVFPATQKNLSIAESRPLDSRFPLEGASDADIGENALLTYRLSPNEYFSLEKPPDDELVKGLGLILRKSLDREEAPEIFLVLTATDGGKPELTGTVQLLITVLDANDNAPAFDRTIYKVRLLENVPNGTLVIKLNASDLDEGLNGDIVYSFSNDISPNVKSKFHIDPITGQIIVKGYIDFEESKSYEIIVEGIDKGQLPLSGHCRVIVEVEDNNDNVPDLEFKSLSLPIREDAPLGTVIALISVSDKDMGVNGLVTCSLTSHVPFKLVSTFKNYYSLVLDSALDRESVSAYELVVTARDGGSPSLWATASVSVEVADVNDNAPAFAQPEYTVFVKENNPPGCHIFTVSAWDADAQENALVSYSLVERRVGERALSSYVSVHAESGKVYALQPLDHEELELLQFQVTARDAGVPPLGSNVTLQVFVLDENDNAPALLAPRAGGTGGAVSELVPWSVGVGHVVAKVRAVDADSGYNAWLSYELQPGTGGARIPFRVGLYTGEISTTRALDETDAPRHRLLVLVKDHGEPALTATATVLVSLVESGQAPKASSRALVGAVGPDAALVDVN

SEQ ID NO: 2825 - protein, 696 aa, synthetic construct
  REGION 1..696: note = PCDHA5 (Q9Y5H7) SP+PP+ECD
MVYSRRGSLGSRLLLLWLLLAYWKAGSGQLHYSIPEEAKHGTFVGRIAQDLGLELAELVPRLFRVASKGRGDLLEVNLQNGILFVNSRIDREELCRRRAECSIHLEVIVDRPLQVFHVEVAVKDINDNPPRFSRQEQRLFILESRMPDSRFPLEGASDLDIGANAQLRYRLNPNEYFDLDVKTNEEETNFLELVLRKSLDREETQEHRLLVIATDGGKPELTGTVQLLINVLDANDNAPEFDKSIYNVRLLENAPSGTLVIKLNASDADEGINKEIVYFFSNLVLDDVKSKFIINSNTGEIKVNGELDYEDYNSYEINIDAMDKSTFPLSGHCKVVVKLLDVNDNTPEMAITTLFLPVKEDAPLSTVIALISVSDRDSGANGQVTCSLMPHVPFKLVSTFKNYYSLVLDSALDRESVSVYELVVTARDGGSPSLWATASVSVEVADVNDNAPAFAQPQYTVFVKENNPPGCHIFTVSARDADAQENALVSYSLVERRVGERPLSSYVSVHAESGKVYALQPLDHEEVELLQFQVSARDAGVPPLGSNVTLQVFVLDENDNAPALLVPRVGGTGGAVSELVPRSVGAGHVVAKVRAVDPDSGYNAWLSYELQPAPGSARIPFRVGLYTGEISTTRSLDETEAPRHRLLVLVKDHGEPPLTATATVLVSLVESGQAPKASSRASAGAVGPEAALVDVN

SEQ ID NO: 2826 - protein, 697 aa, synthetic construct
  REGION 1..697: note = PCDHA6 (Q9UN73) SP+PP+ECD
MVFTPEDRLGKQCLLLPLLLLAAWKVGSGQLHYSVPEEAKHGTFVGRIAQDLGLELAELVPRLFRMASKDREDLLEVNLQNGILFVNSRIDREELCGRSAECSIHLEVIVDRPLQVFHVDVEVRDINDNPPLFPVEEQRVLIYESRLPDSVFPLEGASDADVGSNSILTYKLSSSEYFGLDVKINSDDNKQIGLLLKKSLDREEAPAHNLFLTATDGGKPELTGTVQLLVTVLDVNDNAPTFEQSEYEVRIFENADNGTTVIRLNASDRDEGANGAISYSFNSLVAAMVIDHFSIDRNTGEIVIRGNLDFEQENLYKILIDATDKGHPPMAGHCTVLVRILDKNDNVPEIALTSLSLPVREDAQFGTVIALISVNDLDSGANGQVNCSLTPHVPFKLVSTFKNYYSLVLDSALDRESVSAYELVVTARDGGSPSLWATASLSVEVADMNDNAPAFAQPEYTVFVKENNPPGCHIFTVSARDADAQENALVSYSLVERRVGERALSSYISVHAESGKVYALQPLDHEELELLQFQVSARDAGVPPLGSNVTLQVFVLDENDNAPALLAPRVGGTGGAVSELVPRSLGAGQVVAKVRAVDADSGYNAWLSYELQPPASSARFPFRVGLYTGEISTTRVLDEADSPRHRLLVLVKDHGEPALTATATVLVSLVESGQAPKASSRASVGAAGPEAALVDVN

SEQ ID NO: 2827 - protein, 697 aa, synthetic construct
  REGION 1..697: note = PCDHA7 (Q9UN72) SP+PP+ECD
MVCPNGYDPGGRHLLLFIIILAAWEAGRGQLHYSVPEEAKHGNFVGRIAQDLGLELAELVPRLFRAVCKFRGDLLEVNLQNGILFVNSRIDREELCGRSAECSIHLEVIVERPLQVFHVDVEVKDINDNPPVFPATQRNLFIAESRPLDSRFPLEGASDADIGENALLTYRLSPNEYFFLDVPTSNQQVKPLGLVLRKLLDREETPELHLLLTATDGGKPELTGTVQLLITVLDNNDNAPVFDRTLYTVKLPENVSIGTLVIHPNASDLDEGLNGDIIYSFSSDVSPDIKSKFHMDPLSGAITVIGHMDFEESRAHKIPVEAVDKGFPPLAGHCTVLVEVVDVNDNAPQLTLTSLSLPIPEDAQPGTVITLISVFDRDFGVNGQVTCSLTPRVPFKLVSTFKNYYSLVLDSALDRESVSAYELVVTARDGGSPSLWATASVSVEVADVNDNAPAFAQPEYTVFVKENNPPGCHIFTVSAGDADAQKNALVSYSLVELRVGERALSSYVSVHAESGKVYALQPLDHEELELLQFQVSARDAGVPPLGSNVTLQVFVLDENDNAPALLAPRVGGTGGAVRELVPRSVGAGHVVAKVRAVDADSGYNAWLSYELQPVAAGASIPFRVGLYTGEISTTRALDETDAPRHRLLVLVKDHGEPSLTATATVLVSLVESGQAPKASSRASLGIAGPETELVDVN

SEQ ID NO: 2828 - protein, 697 aa, synthetic construct
  REGION 1..697: note = PCDHA8 (Q9Y5H6) SP+PP+ECD
MDYHWRGELGSWRLLLLLLLLAAWKVGSGQLHYSVPEEAKHGTFVGRIAQDLGLELAELVPRLFRVASKRHRDLLEVSLQNGILFVNSRIDREELCGRSAECSIHLEVIVDRPLQVFHVDVEVKDVNDNPPVFRVKDQKLFVSESRMPDSRFPLEGASDADVGANSVLTYRLSSHDYFMLDVNSKNDENKLVELVLRKSLDREDAPAHHLFLTATDGGKPELTGTVQLLVTVLDVNDNAPTFEQSEYEVRIFENADNGTTVIKLNASDPDEGANGAISYSFNSLVETMVIDHFSIDRNTGEIVIRGNLDFEQENLYKILIDATDKGHPPMAGHCTVLVRILDKNDNVPEIALTSLSLPVREDAQFGTVIALISVNDLDSGANGQVTCSLMPHVPFKLVSTFKNYYSLVLDSALDRERVSAYELVVTARDGGSPSLWATASLSVEVADVNDNAPAFAQPEYTVFVKENNPPGCHIFTVSARDADAQENALVSYSLVERRVGERSLSSYISVHTESGKVYALQPLDHEELELLQFQVSARDAGVPPLGSNVTLQVFVLDENDNAPALLEPRVGGTGGAASKLVPRSVGAGHVVAKVRAVDADSGYNAWLSYELQPAASSPRIPFRVGLYTGEISTTRVLDEADSPRHRLLVLVKDHGEPALTATATVLVSLVESGQAPKASSRQSAGVLGPEAALVDVN

SEQ ID NO: 2829 - protein, 697 aa, synthetic construct
  REGION 1..697: note = PCDHA9 (Q9Y5H5) SP+PP+ECD
MLYSSRGDPEGQPLLLSLLILAMWVVGSGQLHYSVPEEAEHGTFVGRIAQDLGLELAELVPRLFQLDSKGRGDLLEVNLQNGILFVNSRIDREELCGRSAECSIHLEVIVDRPLQVFHVDVEVKDINDNPPVFPATQKNLFIAESRPLDSRFPLEGASDADIGENALLTYRLSPNEYFFLDVPTSNQQVKPLGLVLRKLLDREETPELHLLLTATDGGKPELTGTVQLLITVLDNNDNAPVFDRTLYTVKLPENVSIGTLVIHPNASDLDEGLNGDIIYSFSSDVSPDIKSKFHMDPLSGAITVIGHMDFEESRAHKIPVEAVDKGFPPLAGHCTLLVEVVDVNDNAPQLTIKTLSVPVKEDAQLGTVIALISVIDLDADANGQVTCSLTPHVPFKLVSTYKNYYSLVLDRALDRESVSAYELVVTARDGGSPSLWATARVSVEVADVNDNAPAFAQSEYTVFVKENNPPGCHIFTVSARDADAQENALVSYSLVERRLGERSLSSYVSVHAESGKVYALQPLDHEELELLQFQVSARDAGVPPLGSNVTLQVFVLDENDNAPALLTPRMRGTDGAVSEMVLRSVGAGVVVGKVRAVDADSGYNAWLSYELQPETASASIPFRVGLYTGEISTTRALDETDAPRQRLLVLVKDHGEPALTATATVLVSLVESGQAPKSSSRASVGATGPEVTLVDVN

SEQ ID NO: 2830 - protein, 683 aa, synthetic construct
  REGION 1..683: note = PCDHAC1 (Q9H158) SP+PP+ECD
MVGCGVAVLCLWVSCGAAAGQLEYSVPEETERGVAVGNLSADLRLPAAAMSSRNFRFLSSHRELYFGVDLPSGNLVVREPADREQLCRAKAACVLTYDLVLEDPLELHKIRIHVLDTNDNSPLFPAGDVQLHIPEFLTPGARFTLPNAQDDDEGSNGILSYSLSPSQHFRLDMGSRVDGSEYPELVLEKALDREQRATHLLVLTARDGGLPARSGDAQVTIIVVDTNDNAPVFERSVYRTKVPETAPNGTVLFRVQALDPDEGSNGEVQYSLSNSTQAELRHRFHVHPKSGEVQVAASLGPPETLLEAYIEARDEGVFGLASTAKLLVEVTDVNDHAPELDFLTLSNPVPEDAAPGTVIALFSVKDEDLDSNGRVICGMSSAGPFQLTASFDNYYSLLIDGPLDREQISEYQVLITASDSGSPPLSTRRTITVSVADVNDNTPNFPQPQQELFVAENNGPGASLGRVFAQDPDLGKNGLVSYELLDVISEGPSASSLLAVESSSGAITAKTSFDFEQLRGFHFQVEGRDGGIPPRSATVTINLFVVDRNDNYPVILFPLPRNGSVPVEIVPRSARTGHLVTKVVAEDADSGSNAWLSYHISRASDSSLFRISANIGELRTARLVLPTDAVKQRVVVVVRDHGDPPLSSSVTLGVLLSNSVPQLLPDFEDVWEPGGQLSAQNLY

SEQ ID NO: 2831 - protein, 708 aa, synthetic construct
  REGION 1..708: note = PCDHAC2 (Q9Y5I4) SP+PP+ECD
MEQAGTRPAATEHPRLRRPMPWLLLLPLLLLLLLLLPGPAASQLRYSVPEEQAPGALVGNVARALGLELRRLGPGCLRINHLGAPSPRYLELDLTSGALFVNERIDREALCEQRPRCLLSLEVLAHNPVAVSAVEVEILDINDNSPRFPRPNYQLQVSESVAPGARFHIESAQDPDVGANSVQTYELSPSEHFELDLKPLQENSKVLELVLRKGLDREQAALHHLVLTAVDGGIPARSGTAQISVRVLDTNDNSPAFDQSTYRVQLREDSPPGTLVVKLNASDPDEGSNGELRYSLSSYTSDRERQLFSIDASTGEVRVIGGLDYEEASSYQIYVQATDRGPVPMAGHCKVLVDIVDVNDNAPEVVLTDLYSPVPENATPNTIVAVLSVNDQDSGPNRKVSLGLEATLPFRLNGFGNSYTLVVSGPLDRERVAVYNITVTATDGGIPQLTSLRTLKVEISDINDNPPSFLEDSYSIYIQENNLPGVLLCTVQATDPDEKENAEVTYSLLEREIQGLPVTSYVSINSASGSLYAVNSFDYEKFREFFVTVEAQDKGSPPLSSTVTANVYVVDMNDHAPHILYPTSTNSSAAFEMVPRTAPAGYLVTKVIAMDSDSGQNAWLFYHLAQTSDLDLFKVELHTGEIRTTRKMGDESGSTFNLTVVVRDNGEPSLSASVAITVAVVDRVSKILPDTQRHVKSPRTYSEITLYL

SEQ ID NO: 2832 - protein, 691 aa, synthetic construct
  REGION 1..691: note = PCDHB1 (Q9Y5F3) SP+PP+ECD
MAGTRRKSLQNRQVGSLLIFLCISVGDATTIRYSVAEEMESGSFVANVAKDLGLEVGKLAARGARLVSEGNKMHFRLHRKTGDLFVKEKLDRESLCGKADPCVLHFEVVLVEPLQSFRAEVRVFDINDNAPVFLNKEPLLKIPESTPLGSRFPLQSAQDLDVGLNGLQNYTLSANGYFHLHTRFCSHGPKYAELVLNKPLDREEQPEVNLTITAVDGGSPPKSGTAHIHVVVLDVNDHVPQFSRLVYRAQVSENSPNGSLVATVTAVDLDEGTNKAITYSLAQNPEAILKTFQIDPQNGEVRLRGPLDFEAIETYDIDIQATDGGGLSAHSKVLVEVVDVNDNPPEVMVSSVSSPLPEDSPPQTVVALFTIRDRDIRVGGKVTCFLREDLPFVIKPTFGNSYSLVTDRSLDREEVSGYNITIVAMDTGPPSLSAETMIEVLISDVNDNPPIFREDSYILTVRENNSPAVFIGKVHAEDLDLGENAQITYSLLPPKNGDLSVFAYISINSGNGKLYALRTMDYEAIQDFQFVVKATDGGFLSLSSQVTVRVVVLDDNDNRPMILYPLQNGTLPCNDLVPRSAEAGYLVTKVVAVDGDSGQNSWLSYHLLKATDLGLFSVQRQNGEIHTLRQISERDPMMQKLIILVQDHGQPALSTTVSLNILLVDGFSEPYLQFQDPTKHSRKVNPSTKYL

SEQ ID NO: 2833 - protein, 692 aa, synthetic construct
  REGION 1..692: note = PCDHB10 (Q9UN67) SP+PP+ECD
MAVRELCFPRQRQVLFLFLFWGVSLAGSGFGRYSVTEETEKGSFVVNLAKDLGLAEGELAARGTRVVSDDNKQYLLLDSHTGNLLTNEKLDREKLCGPKEPCMLYFQILMDDPFQIYRAELRVRDINDHAPVFQDKETVLKISENTAEGTAFRLERAQDPDGGLNGIQNYTISPNSFFHINISGGDEGMIYPELVLDKALDREEQGELSLTLTALDGGSPSRSGTSTVRIVVLDVNDNAPQFAQALYETQAPENSPIGFLIVKVWAEDVDSGVNAEVSYSFFDASENIRTTFQINPFSGEIFLRELLDYELVNSYKINIQAMDGGGLSARCRVLVEVLDTNDNPPELIVSSFSNSVAENSPETPLAVFKINDRDSGENGKMVCYIQENLPFLLKPSVENFYILITEGALDREIRAEYNITITVTDLGTPRLKTEHNITVLVSDVNDNAPAFTQTSYTLFVRENNSPALHIGSVSATDRDSGTNAQVTYSLLPPQDPHLPLASLVSINADNGHLFALRSLDYEALQAFEFRVGATDRGSPALSREALVRVLVLDANDNSPFVLYPLQNGSAPCTELVPRAAEPGYLVTKVVAVDGDSGQNAWLSYQLLKATEPGLFGVWAHNGEVRTARLLSERDAAKHRLVVLVKDNGEPPRSATATLHLLLVDGFSQPYLPLPEAAPAQAQAEADLLTVYL

SEQ ID NO: 2834 - protein, 690 aa, synthetic construct
  REGION 1..690: note = PCDHB11 (Q9Y5F2) SP+PP+ECD
MENQGTRTQQIRQVLLLFVLLGMSQAGSETWSFSVAEEMQSGSFVGNLAKDLGLKVRELSSRGARVVSNDKKQRLQLDINTGDLLLSETLDREELCGSIEPCVLHLQVLMQNPTQFLQIELQVRDINDHSPIFSEKQMLLEIPENSPVGAVFLLESAKDLDVGINAVKSYTISPNSHFHIKMRVIPDNRKYPELVLDKALDYEELPELSFILSALDGGSPPRSGTALVRVVVVDINDNSPEFEQAFYEVKIRENSILGSLILIVSAWDLDSGTNGEICYTFSHASEDIRKTFEINQKSGEITLRAPLDFETIESYSIIIQATDGGGLFGKSTVIIHVIDVNDNAPEITVSSITSPIPENTPETVVMVFSIQDIDSGDNGRIVCSIPEDLPFVLKSSVENYYTLETERPLDRESTAEYNITITVTDLGIPRLKTEHNTTVLVSDVNDNAPTFTQTSYTLFVRENNSPALHIGSVSATDRDSGTNAQVNYSLLPPQDLHLPLASLVSINTDNGHLFALRSLDYEALQAFDFRVGATDRGSPALSSEALVRVLVLDANDNSPFVLYPLQNGSAPCTELVPRAAEPGYLVTKVVAVDGDSGQNAWLSYQLLKATEPGLFGVWAHNGEVRTARLLSERDAAKHRLVVLVKDNGEPPRSATATLQVLLVDGFSQPYLPLPEAAPAQAQADSLTVYL

SEQ ID NO: 2835 - protein, 690 aa, synthetic construct
  REGION 1..690: note = PCDHB12 (Q9Y5F1) SP+PP+ECD
MENGGAGTLQIRQVLLFFVLLGMSQAGSETGNFLVMEELQSGSFVGNLAKTLGLEVSELSSRGARVVSNDNKECLQLDTNTGDLLLREMLDREELCGSNEPCVLYFQVLMKNPTQFLQIELQVRDINDHSPVFLEKEMLLEIPENSPVGAVFLLESAKDLDVGINAVKSYTINPNSHFHVKIRVNPDNRKYPELVLDKALDYEERPELSFILTALDGGSPPRSGTALVRVVVVDINDNSPEFEQAFYEVKILENSILGSLVVTVSAWDLDSGTNSELSYTFSHASEDIRKTFEINQKSGDITLTAPLDFEAIESYSIIIQATDGGGLFGKSTVRIQVMDVNDNAPEITVSSITSPIPENTPETVVMVFRIRDRDSGDNGKMVCSIPEDIPFVLKSSVNNYYTLETERPLDRESRAEYNITITVTDLGTPRLKTEHNITVLVSDVNDNAPAFTQTSYALFVRENNSPALHIGSISATDRDSGTNAQVNYSLLPSQDPHLPLASLVSINADNGHLFALRSLDYEALQGFQFRVGATDHGSPALSSEALVRVLVLDANDNSPFVLYPLQNGSAPCTELVPWAAEPGYLVTKVVAVDGDSGQNAWLSYQLLKATEPGLFGVWAHNGEVRTARLLSERDAAKHRLVVLVKDNGEPPRSATATLHVLLVDGFSQPYLPLPEAAPAQAQADSLTVYL

SEQ ID NO: 2836 - protein, 690 aa, synthetic construct
  REGION 1..690: note = PCDHB13 (Q9Y5F0) SP+PP+ECD
MEASGKLICRQRQVLFSFLLLGLSLAGAAEPRSYSVVEETEGSSFVTNLAKDLGLEQREFSRRGVRVVSRGNKLHLQLNQETADLLLNEKLDREDLCGHTEPCVLRFQVLLESPFEFFQAELQVIDINDHSPVFLDKQMLVKVSESSPPGTTFPLKNAEDLDVGQNNIENYIISPNSYFRVLTRKRSDGRKYPELVLDKALDREEEAELRLTLTALDGGSPPRSGTAQVYIEVLDVNDNAPEFEQPFYRVQISEDSPVGFLVVKVSATDVDTGVNGEISYSLFQASEEIGKTFKINPLTGEIELKKQLDFEKLQSYEVNIEARDAGTFSGKCTVLIQVIDVNDHAPEVTMSAFTSPIPENAPETVVALFSVSDLDSGENGKISCSIQEDLPFLLKSAENFYTLLTERPLDRESRAEYNITITVTDLGTPMLITQLNMTVLIADVNDNAPAFTQTSYTLFVRENNSPALHIRSVSATDRDSGTNAQVTYSLLPPQDPHLPLTSLVSINADNGHLFALRSLDYEALQGFQFRVGASDHGSPALSSEALVRVVVLDANDNSPFVLYPLQNGSAPCTELVPRAAEPGYLVTKVVAVDGDSGQNAWLSYQLLKATELGLFGVWAHNGEVRTARLLSERDAAKHRLVVLVKDNGEPPRSATATLHVLLVDGFSQPYLPLPEAAPTQAQADLLTVYL

SEQ ID NO: 2837 - protein, 686 aa, synthetic construct
  REGION 1..686: note = PCDHB14 (Q9Y5E9) SP+PP+ECD
MEIRGALDLRKRQVLIFLVLLGLSRAGTESAHYSVAEETEIGSFVANLARDLGLGVEELSSREARVVSDDNKKYLHLDLLTGNLLLNEKLDRDELCGSTEPCVLHFQVVLENPLQFFRFELCVKDINDHSPTFLDKEILIKISEGTTVGATFLMESAQDLDVGSNSLQNYTISPNSHFYIKIPDSSDRKIYPELVLDRALDYEQEAELRLTLTAVDGGSPPKSGTTLVLIKVLDINDNAPEFPQSLYEVQVPEDRPLGSWIATISAKDLDAGNYGKISYTFFHASEDIRKTFEINPISGEVNLRSPLDFEVIQSYTINIQATDGGGLSGKCTLLVKVMDINDNPPEVTISSITKRIPENASETLVALFSILDQDSGDNGRMICSIQDNLPFFLKPTFKNFFTLVSEKALDRESQAEYNITITVTDLGTPRLKTEYNITVLLSDVNDNAPTFTQTSYTLFVRENNSPALHIGSVSATDRDSGTNAQVNYSLLPPQDRHLPLASLVSINADNGHLFALRSLDYEALQEFEFRVGATDRGSPALSSEALVRVLVLDANDNSPFVLYPLQNGSAPCTELVPRAAEPGYLVTKVVAVDGDSGQNAWLSYQLLKATEPGLFGVWAHNGEVRTARLLSERDAAKHRLVVLVKDNGEPPRSATATLHVLLVDGFSQPYLPLPEAAPAQAQADSL

SEQ ID NO: 2838 - protein, 690 aa, synthetic construct
  REGION 1..690: note = PCDHB15 (Q9Y5E8) SP+PP+ECD
MEPAGERFPEQRQVLILLLLLEVTLAGWEPRRYSVMEETERGSFVANLANDLGLGVGELAERGARVVSEDNEQGLQLDLQTGQLILNEKLDREKLCGPTEPCIMHFQVLLKKPLEVFRAELLVTDINDHSPEFPEREMTLKIPETSSLGTVFPLKKARDLDVGSNNVQNYNISPNSHFHVSTRTRGDGRKYPELVLDTELDREEQAELRLTLTAVDGGSPPRSGTVQILILVLDANDNAPEFVQALYEVQVPENSPVGSLVVKVSARDLDTGTNGEISYSLYYSSQEIDKPFELSSLSGEIRLIKKLDFETMSSYDLDIEASDGGGLSGKCSVSVKVLDVNDNFPELSISSLTSPIPENSPETEVALFRIRDRDSGENGKMICSIQDDVPFKLKPSVENFYRLVTEGALDRETRAEYNITITITDLGTPRLKTEQSITVLVSDVNDNAPAFTQTSYTLFVRENNSPALHIGSVSATDRDSGTNAQVTYSLLPPRDPHLPLTSLVSINTDNGHLFALQSLDYEALQAFEFRVGATDRGFPALSSEALVRVLVLDANDNSPFVLYPLQNGSAPCTELVPRAAEPGYLVTKVVAVDGDSGQNAWLSYQLLKATEPGLFGVWAHNGEVRTARLLSERDVAKHRLVVLVKDNGEPPRSATATLQVLLVDGFSQPYLPLPEAAPAQAQADSLTVYL

SEQ ID NO: 2839 - protein, 690 aa, synthetic construct
  REGION 1..690: note = PCDHB16 (Q9NRJ7) SP+PP+ECD
MEIGWMHNRRQRQVLVFFVLLSLSGAGAELGSYSVVEETERGSFVANLGKDLGLGLTEMSTRKARIISQGNKQHLQLKAQTGDLLINEKLDREELCGPTEPCILHFQVLMENPLEIFQAELRVIDINDHSPMFTEKEMILKIPENSPLGTEFPLNHALDLDVGSNNVQNYKISPSSHFRVLIHEFRDGRKYPELVLDKELDREEEPQLRLTLTALDGGSPPRSGTAQVRIEVVDINDNAPEFEQPIYKVQIPENSPLGSLVATVSARDLDGGANGKISYTLFQPSEDISKTLEVNPMTGEVRLRKQVDFEMVTSYEVRIKATDGGGLSGKCTLLLQVVDVNDNPPQVTMSALTSPIPENSPEIVVAVFSVSDPDSGNNGKTISSIQEDLPFLLKPSVKNFYTLVTERALDREARAEYNITLTVTDMGTPRLKTEHNITVQISDVNDNAPTFTQTSYTLFVRENNSPALHIGSVSATDRDSGTNAQVTYSLLPPQDPHLPLASLVSINADNGHLFALRSLDYEALREFEFRVSATDRGSPALSSEALVRVLVLDANDNSPFVLYPLQNGSAPCTELVPRAAEPGYLVTKVVAVDGDSGQNAWLSYQLLKATEPGLFGVWAHNGEVRTARLLSERDAAKQRLVVLVKDNGEPPRSATATLHVLLVDGFSQPFLPLPEAAPGQTQANSLTVYL

SEQ ID NO: 2840 - protein, 692 aa, synthetic construct
  REGION 1..692: note = PCDHB2 (Q9Y5E7) SP+PP+ECD
MEAGEGKERVPKQRQVLIFFVLLGIAQASCQPRHYSVAEETESGSFVANLLKDLGLEIGELAVRGARVVSKGKKMHLQFDRQTGDLLLNEKLDREELCGPTEPCVLPFQVLLENPLQFFQAELRIRDVNDHSPVFLDKEILLKIPESITPGTTFLIERAQDLDVGTNSLQNYTISPNFHFHLNLQDSLDGIILPQLVLNRALDREEQPEIRLTLTALDGGSPPRSGTALVRIEVVDINDNVPEFAKLLYEVQIPEDSPVGSQVAIVSARDLDIGTNGEISYAFSQASEDIRKTFRLSAKSGELLLRQKLDFESIQTYTVNIQATDGGGLSGTCVVFVQVMDLNDNPPELTMSTLINQIPENLQDTLIAVFSVSDPDSGDNGRMVCSIQDDLPFFLKPSVENFYTLVISTALDRETRSEYNITITVTDFGTPRLKTEHNITVLVSDVNDNAPAFTQTSYTLFVRENNSPALHIGSVSATDRDSGTNAQVTYSLLPPQDPHLPLASLVSINADNGHLFALQSLDYEALQAFEFRVGAADRGSPALSSEALVRVLVLDANDNSPFVLYPLQNGSAPCTELVPRAAEPGYLVTKVVAVDGDSGQNAWLSYQLLKATEPGLFGVWAHNGEVRTARLLRERDAAKQRLVVLVKDNGEPPRSATATLHVLLVDGFSQPYLLLPEAAPAQAQADLLTVYL

SEQ ID NO: 2841 - protein, 690 aa, synthetic construct
  REGION 1..690: note = PCDHB3 (Q9Y5E6) SP+PP+ECD
MEAGGERFLRQRQVLLLFVFLGGSLAGSESRRYSVAEEKEKGFLIANLAKDLGLRVEELAARGAQVVSKGNKQHFQLSHQTGDLLLNEKLDREELCGPTEPCILHFQILLQNPLQFVTNELRIIDVNDHSPVFFENEMHLKILESTLPGTVIPLGNAEDLDVGRNSLQNYTITPNSHFHVLTRSRRDGRKYPELVLDKALDPEEQPELSLTLTALDGGSPPRSGTAQINIQVLDINDNAPEFAQPLYEVAVLENTPVNSVIVTVSASDLDTGSFGTISYAFFHASEEIRKTFQLNPITGDMQLVKYLNFEAINSYEVDIEAKDGGGLSGKSTVIVQVVDVNDNPPELTLSSVNSPIPENSGETVLAVFSVSDLDSGDNGRVMCSIENNLPFFLKPSVENFYTLVSEGALDRETRSEYNITITITDLGTPRLKTKYNITVLVSDVNDNAPAFTQISYTLFVRENNSPALHIGSVSATDRDSGTNAQVTYSLLPPQDPHLPLSSLVSINADNGHLFALRSLDYEALQAFEFRVGATDRGSPALSSEALVRVLVLDANDNSPFVLYPLQNGSAPCTELVPRAAEPGYLVTKVVAVDGDSGQNAWLSYQLLKATEPGLFGVWAHNGEVRTARLLSERDAAKHRLVVLVKDNGEPPRSATATLHVLLVDGFSQPYLPLPEAAPAQAQADLLTVYL

SEQ ID NO: 2842 - protein, 689 aa, synthetic construct
  REGION 1..689: note = PCDHB4 (Q9Y5E5) SP+PP+ECD
MKKLGRIHPNRQVLAFILMVFLSQVRLEPIRYSVLEETESGSFVAHLAKDLGLGIGELASRSARVLSDDDKQRLQLDRQTGDLLLREKLDREELCGPIEPCVLHFQVFLEMPVQFFQGELLIQDINDHSPIFPEREVLLKILENSQPGTLFPLLIAEDLDVGSNGLQKYTISPNSHFHILTRNHSEGKKYPDLVQDKPLDREEQPEFSLTLVALDGGSPPRSGTVMVRILIMDINDNAPEFVHTPYGVQVLENSPLDSPIVRVLARDIDAGNFGSVSYGLFQASDEIKQTFSINEVTGEILLKKKLDFEKIKSYHVEIEATDGGGLSGKGTVVIEVVDVNDNPPELIISSLTSSIPENAPETVVSIFRIRDRDSGENGKMICSIPDNLPFILKPTLKNFYTLVTERPLDRETSAEYNITIAVTDLGTPRLKTQQNITVQVSDVNDNAPAFTQTSYTLFVRENNSPALHIGSVSATDRDSGTNAQVTYSLLPPQDPHLPLASLVSINADNGHLFALRSLDYEALQAFEFRVGASDRGSPALSSEALVRVLVLDTNDNSPFVLYPLQNGSAPCTELVPRAAEPGYLVTKVVAVDGDSGQNAWLSYQLLKATEPGLFGVWAHNGEVRTARLLSERDAAKHRLVVLVKDNGEPPRSATATLHVLLVDGFSQPYLPLPEAAPAQAQADSLTVYL

SEQ ID NO: 2843 - protein, 689 aa, synthetic construct
  REGION 1..689: note = PCDHB5 (Q9Y5E4) SP+PP+ECD
METALAKTPQKRQVMFLAILLLLWEAGSEAVRYSIPEETESGYSVANLAKDLGLGVGELATRGARMHYKGNKELLQLDIKTGNLLLYEKLDREVMCGATEPCILHFQLLLENPVQFFQTDLQLTDINDHAPEFPEKEMLLKIPESTQPGTVFPLKIAQDFDIGSNTVQNYTISPNSHFHVATHNRGDGRKYPELVLDKALDREERPELSLTLTALDGGAPPRSGTTTIRIVVLDNNDNAPEFLQSFYEVQVPENSPLNSLVVVVSARDLDAGAYGSVAYALFQGDEVTQPFVIDEKTAEIRLKRALDFEATPYYNVEIVATDGGGLSGKCTVAIEVVDVNDNAPELTMSTLSSPTPENAPETVVAVFSVSDPDSGDNGRMICSIQNDLPFLLKPTLKNFYTLVTQRTLDRESQAEYNITITVTDMGTPRLKTEHNITVLVSDVNDNAPAFTQTSYTLFVRENNSPALHIGSVSATDRDSGTNAQVTYSLLPPQNPHLRLASLVSINADNGHLFALRSLDYEALQAFEFRVGATDRGSPALSSEALVRVLVLDANDNSPFVLYPLQNGSAPCTELVPRAAEPGYLVTKVVAVDGDSGQNAWLSYQLLKATEPGLFSMWAHNGEVRTARLLSERDAAKHRLVVLVKDNGEPPRSATATLHVLLVDGFSQPYLPLPEAAPAQAQADSLTVYL

SEQ ID NO: 2844 - protein, 688 aa, synthetic construct
  REGION 1..688: note = PCDHB6 (Q9Y5E3) SP+PP+ECD
MMQTKVQNKKRQVAFFILLMLWGEVGSESIQYSVLEETESGTFVANLTKDLGLRVGELASRGARVVFKGNRQHLQFDPQTHDLLLNEKLDREELCGSTEPCVLPFQVLLENPLQFFQASLRVRDINDHAPEFPAREMLLKISEITMPGKIFPLKMAHDLDTGSNGLQRYTISSNPHFHVLTRNRSEGRKFPELVLDKPLDREEQPQLRLTLIALDGGSPPRSGTSEIQIQVLDINDNVPEFAQELYEAQVPENNPLGSLVITVSARDLDAGSFGKVSYALFQVDDVNQPFEINAITGEIRLRKALDFEEIQSYDVDVEATDGGGLSGKCSLVVRVLDVNDNAPELTMSFFISLIPENLPEITVAVFSVSDADSGHNQQVICSIENNLPFLLRPSVENFYTLVTEGALDRESRAEYNITITVTDLGTPRLKTQQSITVQVSDVNDNVPAFTQTSYTLFVRENNSPALHIGSVSATDRDSGINAQVTYSLLPPQDPHLPLSSLVSINADNGHLFALRSLDYEALQSFEFRVGATDRGSPALSSEALVRLLVLDANDNSPFVLYPLQNGSAPCTELVPRAAEPGYLVTKVVAVDGDSGQNAWLSYQLLKATELGLFGVWAHNGEVRTARLLSERDAAKHRLVVLVKDNGEPPRSATATLHVLLVDGFSQPYLPLPEAAPAQAQADSLTVYL

SEQ ID NO: 2845 - protein, 688 aa, synthetic construct
  REGION 1..688: note = PCDHB7 (Q9Y5E2) SP+PP+ECD
MEARVERAVQKRQVLFLCVFLGMSWAGAEPLRYFVAEETERGTFLTNLAKDLGLGVGELRARGTRIVSDQNMQILLLSSLTGDLLLNEKLDREELCGPREPCVLPFQLLLEKPFQIFRAELWVRDINDHAPVFLDREISLKILESTTPGAAFLLESAQDSDVGTNSLSNYTISPNAYFHINVHDSGEGNIYPELVLNQVLDREEIPEFSLTLTALDGGSPPRSGTALVRILVLDVNDNAPDFVRSLYKVQVPENSPVGSMVVSVSARDLDTGSNGEIAYAFSYATERILKTFQINPTSGSLHLKAQLDYEAIQTYTLTIQAKDGGGLSGKCTVVVDVTDINDNRPELLLSSLTSPIAENSPETVVAVFRIRDRDSGNNGKTVCSIQDDVPFILKPSVENFYTLVTEKPLDRERNTEYNITITVTDLGTPRLKTEHNITVLVSDVNDNAPAFTQTSYTLFVRENNSPALPIGSVSATDRDSGTNAQVIYSLLPSQDPHLPLASLVSINADNGHLFALRSLDYEALQAFEFRVGATDRGSPALSSEALVRVLVLDANDNSPFVLYPLQNSSAPCTEPLPRAAEPGYLVTKVVAVDGDSGQNAWLSYQLLKATEPGLFGVWAHNGEVRTARLLSERDAAKQRLVVLVKDNGEPPRSATATLHVLLVDGFSQPYLRLPEAAPDQANSLTVYL

SEQ ID NO: 2846 - protein, 691 aa, synthetic construct
  REGION 1..691: note = PCDHB8 (Q9UN66) SP+PP+ECD
MEASGKLICRQRQVLFSFLLLGLSLAGAAEPRSYSVVEETEGSSFVTNLAKDLGLEQREFSRRGVRVVSRGNKLHLQLNQETADLLLNEKLDREDLCGHTEPCVLRFQVLLESPFEFFQAELQVIDINDHSPVFLDKQMLVKVSESSPPGTAFPLKNAEDLDIGQNNIENYIISPNSYFRVLTRKRSDGRKYPELVLDKALDREEEAELRLTLTALDGGSPPRSGTAQVYIEVVDVNDNAPEFEQPFYRVQISEDSPISFLVVKVSATDVDTGVNGEISYSLFQASDEISKTFKVDFLTGEIRLKKQLDFEKFQSYEVNIEARDAGGFSGKCTVLIQVIDVNDHAPEVTMSAFTSPIPENAPETVVALFSVSDLDSGENGKISCSIQEDLPFLLKSSVGNFYTLLTETPLDRESRAEYNVTITVTDLGTPRLTTHLNMTVLVSDVNDNAPAFTQTSYTLFVRENNSPALHIGSVSATDRDSGTNAQVTYSLLPPQDPHLPLASLVSINTDNGHLFALRSLDYEALQAFEFRVGASDRGSPALSSEALVRVLVLDANDNSPFVLYPLQNGSAPCTELVPRAAEPGYLVTKVVAVDGDSGQNAWLSYQLLKATEPGLFGVWAHNGEVRTARLLSERDAAKQRLVVLVKDNGEPPCSATATLHVLLVDGFSQPYLPLPEAAPAQGQADSLTVYL

SEQ ID NO: 2847 - protein, 690 aa, synthetic construct
  REGION 1..690: note = PCDHB9 (Q9Y5E1) SP+PP+ECD
MKTRGFSFPRQRQVLFLFLFWGVSLAGSGFGRYSVTEETEKGSFVVNLAKDLGLAEGELAARGTRVVSDDNKQYLLLDSHTGNLLTNEKLDREKLCGPKEPCMLYFQILMDDPFQIYRAELRVRDINDHSPVFRHKEMVLKISENTAEGTAFRLERAQDPDEGHNSIQNYTISSNSFFHIKISGSDEGMIYPELVLDKALDREEQEELSLTLTALDGGSPSRSGTSTIRIVVLDVNDNAPQFAQALYETQAPENSPVGSLIVKVSAGDADSGVNAEVSYSFFDASEDILTTFQINPFSGEIFLRELLDYELVNSYKINIQAMDGGGLSARCTVLIKVLDSNDNPPELIISSLSNSVAENSPGIVLAVFKIKDRDSGENGKTICYVQDNLPFFLKPSVDNFYILMTEGALDRESKAEYNITITVTDLGTPRLKTEHSITLQVSDVNDNAPAFTQTSYTLFVRENNSPALHIGSVSATDRDSGTNAQVTYSLLPPQDPHLPLASLVSINADNGHLFALRSLDYEALQAFDFRVGASDRGSPALSSEALVRVLVLDANDNSPFVLYPLQNGSAPCTELVPRAAEPGYLVTKVVAVDGDSGQNAWLSYQLLKATEPGLFGVWAHNGEVRTARLLSERDAAKHRLVVLVKDNGEPPRSATATLHVLLVDGFSQPYLPLPEAAPAQAQADLLTVYL

SEQ ID NO: 2848 - protein, 692 aa, synthetic construct
  REGION 1..692: note = PCDHGA1 (Q9Y5H4) SP+PP+ECD
MKIQKKLTGCSRLMLLCLSLELLLEAGAGNIHYSVPEETDKGSFVGNIAKDLGLQPQELADGGVRIVSRGRMPLFALNPRSGSLITARRIDREELCAQSMPCLVSFNILVEDKMKLFPVEVEIIDINDNTPQFQLEELEFKMNEITTPGTRVSLPFGQDLDVGMNSLQSYQLSSNPHFSLDVQQGADGPQHPEMVLQSPLDREEEAVHHLILTASDGGEPVRSGTLRIYIQVVDANDNPPAFTQAQYHINVPENVPLGTQLLMVNATDPDEGANGEVTYSFHNVDHRVAQIFRLDSYTGEISNKEPLDFEEYKMYSMEVQAQDGAGLMAKVKVLIKVLDVNDNAPEVTITSVTTAVPENFPPGTIIALISVHDQDSGDNGYTTCFIPGNLPFKLEKLVDNYYRLVTERTLDRELISGYNITITAIDQGTPALSTETHISLLVTDINDNSPVFHQDSYSAYIPENNPRGASIFSVRAHDLDSNENAQITYSLIEDTIQGAPLSAYLSINSDTGVLYALRSFDYEQFRDMQLKVMARDSGDPPLSSNVSLSLFLLDQNDNAPEILYPALPTDGSTGVELAPLSAEPGYLVTKVVAVDRDSGQNAWLSYRLLKASEPGLFSVGLHTGEVRTARALLDRDALKQSLVVAVQDHGQPPLSATVTLTVAVADRISDILADLGSLEPSAKPNDSDLTLY

SEQ ID NO: 2849 - protein, 696 aa, synthetic construct
  REGION 1..696: note = PCDHGA10 (Q9Y5H3) SP+PP+ECD
MAAQRNRSKESKDCSGLVLLCLFFGIPWEAGARQISYSIPEELEKGSFVGNISKDLGLAPRELAERGVRIVSRGRTQLFSLNPRSGSLITAGRIDREELCAQSARCVVSFNILVEDRVKLFGIEIEVTDINDNAPKFQAENLDVKINENVAAGMRFPLPEAIDPDVGVNSLQSYQLSPNKHFSLRVQSRANGVKYPELVLEHSLDREEEAIHHLVLTASDGGDPLRSGTVLVSVTVFDANDNAPVFTLPEYRVSVPENLPVGTQLLTVTATDRDEGANGEVTYSFRKLPDTQLLKFQLNKYTGEIKISENLDYEETGFYEIEIQAEDGGAYLATAKVLITVEDVNDNSPELTITSLFSPVTEDSPLGTVVALLNVHDLDSEQNGQVTCSILAYLPFKLEKSIDSYYRLVIHRALDREQVSSYNITVTATDGGSPPLSTEAHFMLQVADINDNPPTFSQVSYFTYIPENNARGASIFSVTALDPDSKENAQIIYSLAEDTIQGVPLSSYISINSDTGVLYALRSFDYEQFHELQMQVTASDSGDPPLSSNVSLSLFVLDQNDNAPEILYPALPTDGSTGVELAPRSAEPGYLVTKVVAVDRDSGQNAWLSYRLLKASEPGLFAVGEHTGEVRTARALLDRDALKQSLVVAVQDHGQPPLSATVTLTVAVADSIPQVLADLGSFESPANSETSDLTLY

SEQ ID NO: 2850 - protein, 693 aa, synthetic construct
  REGION 1..693: note = PCDHGA11 (Q9Y5H2) SP+PP+ECD
MANRLQRGDRSRLLLLLCIFLGTLRGFRARQIRYSVPEETEKGSFVGNISKDLGLEPRELAKRGVRIVSRGKTQLFAVNPRSGSLITAGRIDREELCETVSSCFLNMELLVEDTLKIYGVEVEIIDINDNAPSFQEDEVEIKVSEHAIPGARFALPNARDPDVGVNSLQSYQLSPNNYFSLQLRGRTDGAKNPELVLEGSLDREKEAAHLLLLTALDGGDPIRKGAVPIRVVVLDVNDHIPMFTQSVYRVSVPENISSGTRVLMVNATDPDEGINGEVMYSFRNMESKASEIFQLDSQTGEVQVRGSLDFEKYRFYEMEIQGQDGGGLFTTTTMLITVVDVNDNAPEITITSSINSILENSPPGTVIALLNVQDQDSGENGQVSCFIPNHLPFKLEKTYGNYYKLITSRVLDRELVQSYNITLTATDQGSPPLSAETHVWLNVADDNDNPPVFPHSSYSAYIPENNPRGASIFSVTALDPDSKQNALVTYSLTDDTVQGVPLSSYVSINSNTGVLYALQSFDYEQFRDLELRVIARDSGDPPLSSNVSLSLFVLDQNDNAPEILYPALPTDGSTGVELAPRSAEPGYLVTKVVAVDKDSGQNAWLSYRLLKASEPGLFAVGEHTGEVRTARALLDRDALKQSLVVAVQDHGQPPLSATVTLTVAVADSIPEVLADLGSLESLANSETSDLSLY

SEQ ID NO: 2851 - protein, 692 aa, synthetic construct
  REGION 1..692: note = PCDHGA12 (O60330) SP+PP+ECD
MIPARLHRDYKGLVLLGILLGTLWETGCTQIRYSVPEELEKGSRVGDISRDLGLEPRELAERGVRIIPRGRTQLFALNPRSGSLVTAGRIDREELCMGAIKCQLNLDILMEDKVKIYGVEVEVRDINDNAPYFRESELEIKISENAATEMRFPLPHAWDPDIGKNSLQSYELSPNTHFSLIVQNGADGSKYPELVLKRALDREEKAAHHLVLTASDGGDPVRTGTARIRVMVLDANDNAPAFAQPEYRASVPENLALGTQLLVVNATDPDEGVNAEVRYSFRYVDDKAAQVFKLDCNSGTISTIGELDHEESGFYQMEVQAMDNAGYSARAKVLITVLDVNDNAPEVVLTSLASSVPENSPRGTLIALLNVNDQDSEENGQVICFIQGNLPFKLEKSYGNYYSLVTDIVLDREQVPSYNITVTATDRGTPPLSTETHISLNVADTNDNPPVFPQASYSAYIPENNPRGVSLVSVTAHDPDCEENAQITYSLAENTIQGASLSSYVSINSDTGVLYALSSFDYEQFRDLQVKVMARDNGHPPLSSNVSLSLFVLDQNDNAPEILYPALPTDGSTGVELAPRSAEPGYLVTKVVAVDRDSGQNAWLSYRLLKASEPGLFSVGLHTGEVRTARALLDRDALKQSLVVAVQDHGQPPLSATVTLTVAVADSIPQVLADLGSLESPANSETSDLTLY

SEQ ID NO: 2852 - protein, 692 aa, synthetic construct
  REGION 1..692: note = PCDHGA2 (Q9Y5H1) SP+PP+ECD
MAALQKLPHCRKLVLLCFLLATLWEARAGQIRYSVREEIDRGSFVGNIAKDLGLEPLALAEQGVRIVSRGRSQLFALNPRSGSLVTANRIDREELCAQSAPCLLNFNILLEDKLTIYSVEVEITDINDNAPRFGVEELELKISETTTPGFRIPLKNAHDADVGENALQKYALNPNDHFSLDVRRGADGNKYPELVLERSLDREEEAVHHLVLVASDGGDPVLSGTSRICVKVLDANDNAPVFTQPEYRISIPENTLVGTRILTVTATDADEGYYAQVVYFLEKSPGETSEVFELKSTSGELTIIKDLDYEDATFHEIDIEAQDGPGLLTRAKVIVTVLDVNDNAPEFYMTSATSSVSEDSLPGTIIGLFNVHDRDSGQNAFTTCSLPEDLPFKLEKSVDNYYRLVTTRALDREQFSFYNITLTAKDGGNPSLSTDAHILLQVADINDNAPAFSRTSYSTYIPENNPRGASVFSVTAHDPDSNDNAHVTYSFAEDTVQGAPLSSYISINSDTGVLYALRSFDYEQLRDLQVWVIARDSGNPPLSSNVSLSLFVLDQNDNAPEILYPAFPTDGSTGVELAPRSAEPGYLVTKVVAVDRDSGQNAWLSYHLLKASEPGLFSVGLHTGEVRTARALLDRDALKQSLVVAIQDHGQPPLSATVTLTVAVADRIPDILADLGSLEPSAIPNDSDLTLY

SEQ ID NO: 2853 - protein, 692 aa, synthetic construct
  REGION 1..692: note = PCDHGA3 (Q9Y5H0) SP+PP+ECD
MTNCLSFRNGRGLALLCALLGTLCETGSGQIRYSVSEELDKGSFVGNIANDLGLEPRELAERGVRIVSRGRTQLFSLNPQSGSLVTAERIDREELCAQIPLCLVKINILVEDKLKIFEVEIEIKDINDNAPNFPTEELEIKIGELTVPGTRFPIKTAFDPDVGINSLQNYKLSPNDYFSLAVNSVSEGAKYPELVLERALDREKKEIHQLVLVASDGGDPVHSGNLHIQVIVLDANDNPPMFTQPEYRVSVWENVPVGTRLLTVNATDPDEGFNAQVSYILDKMPGKIAEIFHLNSVSGEVSILKSLDYEDAMFYEIKIEAQDGPGLLSRAKILVTVLDVNDNAPEITITSLTSSVPEEGTVGREIALIDVHDRDSGQNGQVEVFVLGNLPFKLEKSIDQYYRLVTATSLDREQISEYNISLRASDGGSPPLSTETHITLHVIDINDNPPTFPHLSYSAYIPENNPRGASIFSVTAQDPDSNNNARITYALTEDTLQGAPLSSFVSINSNTGVLYALRSFDYEQFRDLKLLVTASDSGNPPLSSNVSLNLFVLDQNDNAPEILYPALPTDGSTGVELAPRSAEPGYLVTKVVAVDRDSGQNAWLSYRLLKASEPGLFSVGLHTGEVRTARALLDRDALKQSLVVAVQDHGQPPLSATVTLTVAVADRIPDILADLGSLEPSAKPNDSDLTLY

SEQ ID NO: 2854 - protein, 723 aa, synthetic construct
  REGION 1..723: note = PCDHGA4 (Q9Y5G9) SP+PP+ECD
MHFILDPEDPGAPQASTEGKPKHRRLRGGVVMAAPPARPDHTRLLQICLLLGVLVEIRAEQILYSVFEEQEEGSVVGNIAKDLGLAPRELAERGVRIVSRGRTQLFALNPRSGTLVTAGRIDREELCDRSPNCVTNLEILLEDTVKILRVEVEIIDVNDNPPSFGTEQREIKVAENENPGARFPLPEAFDPDVGVNSLQGYQLNSNGYFSLDVQSGADGIKYPELVLERALDREEEAVHHLVLTAFDGGDPVRSGTARILIILVDTNDNAPVFTQPEYHVSVRENVPVGTRLLTVKATDPDEGANGDVTYSFRKVRDKISQLFQLNSLSGDITILGGLDYEDSGFYDIDVEAHDGPGLRARSKVLVTVLDENDNAPEVTVTSLTSSVQESSSPGTVIALFNVHDSDSGGNGLVTCSIPDNLPFTLEKTYGNYYRLLTHRTLDREEVSEYNITVTATDQGTPPLSTETHISLQVMDINDNPPTFPHASYSAYIPENNPRGASILSMTAQDPDSGDNARITYSLAEDTFQGAPLSSYVSINSNTGILYALCSFDYEQFRDLQLLMTASDSGDPPLSSNVSLSLFVLDQNDNVPEILYPTFPTDGSTGVELAPRSADSGYLVTKVVAVDRDSGQNAWLSYSLLKSSEPGLFAVGLHTGEVRTARALLDRDALKQRLVVVVQDHGQPPLSATVTLTVAVADSIPDVLADLGSLKPSADPDDSGLTLY

SEQ ID NO: 2855 - protein, 692 aa, synthetic construct
  REGION 1..692: note = PCDHGA5 (Q9Y5G8) SP+PP+ECD
MASPPRGWGCGELLLPFMLLGTLCEPGSGQIRYSMPEELDKGSFVGNIAKDLGLEPQELAERGVRIVSRGRTQLFALNPRSGSLVTAGRIDREELCAQSPLCVVNFNILVENKMKIYGVEVEIIDINDNFPRFRDEELKVKVNENAAAGTRLVLPFARDADVGVNSLRSYQLSSNLHFSLDVVSGTDGQKYPELVLEQPLDREKETVHDLLLTALDGGDPVLSGTTHIRVTVLDANDNAPLFTPSEYSVSVPENIPVGTRLLMLTATDPDEGINGKLTYSFRNEEEKISETFQLDSNLGEISTLQSLDYEESRFYLMEVVAQDGGALVASAKVVVTVQDVNDNAPEVILTSLTSSISEDCLPGTVIALFSVHDGDSGENGEIACSIPRNLPFKLEKSVDNYYHLLTTRDLDREETSDYNITLTVMDHGTPPLSTESHIPLKVADVNDNPPNFPQASYSTSVTENNPRGVSIFSVTAHDPDSGDNARVTYSLAEDTFQGAPLSSYVSINSDTGVLYALRSFDYEQLRDLQLWVTASDSGNPPLSSNVSLSLFVLDQNDNTPEILYPALPTDGSTGVELAPRSAEPGYLVTKVVAVDKDSGQNAWLSYRLLKASEPGLFAVGLHTGEVRTARALLDRDALKQSLVVAVEDHGQPPLSATFTVTVAVADRIPDILADLGSIKTPIDPEDLDLTLY

SEQ ID NO: 2856 - protein, 692 aa, synthetic construct
  REGION 1..692: note = PCDHGA6 (Q9Y5G7) SP+PP+ECD
MAPPQRHPQRSEQVLLLTLLGTLWGAAAAQIRYSIPEELEKGSFVGNIVKDLGLEPQELAEHGVRIVSRGRMQLFSLNPRNGSLVTAGRIDREELCAQSPRCLVSFNILVEDKLNLYPVEVEIVDINDNTPRFLKEELEVKILENAAPSSRFPLMEVYDPDVGMNSLQGFKLSGNSHFSVDVQSEAHGPKYPELVLEGTLDREGEAVYRLVLTAMDGGDPVRSSVAQILVTVLDVNDNTPMFTQPVYRVSVPENLPVGTPVLAVTATDQDEGVHGEVTYSFVKITEKISQIFCLNVLTGEISTSANLDYEDSSFYELGVEARDGPGLRDRAKVLITILDVNDNVPEVVVTSGSRTIAESAPPGTVIALFQVFDRDSGLNGLVTCSIPRSLPFELEKSVGNYYRLVTNAALDREEVFLYNITVTATDKGTPPLSTETIISLNVADTNDNPPTFPHSSYSVYVLENNPRGASIFSVNALDPDVDQNAQVSYSLAEDTLQGAPLSSYVSINSDTGILYALRSFDYEQLRDLQLWVTASDSGDPPLSSNVSLSLFVLDQNDNAPEILYPALPTDGSTGVELAPRSAEPGYLVTKVVAVDRDSGQNAWLSYRLLKASEPGLFSVGLHTGEVRTARALLDRDALKQSLVVAVQDHGQPPLSATVTLTVAVADRIPDILADLGSLEPSAKPNDSDLTLY

SEQ ID NO: 2857 - protein, 692 aa, synthetic construct
  REGION 1..692: note = PCDHGA7 (Q9Y5G6) SP+PP+ECD
MAAQPRGGDYRGFFLLSILLGTPWEAWAGRILYSVSEETDKGSFVGDIAKDLGLEPRELAERGVRIISRGRTQLFALNQRSGSLVTAGRIDREEICAQSARCLVNFNILMEDKMNLYPIDVEIIDINDNVPRFLTEEINVKIMENTAPGVRFPLSEAGDPDVGTNSLQSYQLSPNRHFSLAVQSGDDETKYPELVLERVLDREEERVHHLVLTASDGGDPPRSSTAHIQVTVVDVNDHTPVFSLPQYQVTVPENVPVGTRLLTVHAIDLDEGVNGEVTYSFRKITPKLPKMFHLNSLTGEISTLEGLDYEETAFYEMEVQAQDGPGSLTKAKVLITVLDVNDNAPEVTMTSLSSSIPEDTPLGTVIALFYLQDRDSGKNGEVTCTIPENLPFKLEKSIDNYYRLVTTKNLDRETLSLYNITLKATDGGTPPLSRETHIFMQVADTNDNPPTFPHSSYSVYIAENNPRGASIFLVTAQDHDSEDNAQITYSLAEDTIQGAPVSSYVSINSDTGVLYALQSFDYEQLRELQLRVTAHDSGDPPLSSNMSLSLFVLDQNDNPPEILYPALPTDGSTGMELAPRSAEPGYLVTKVVAVDKDSGQNAWLSYLLLKASEPGLFAVGLYTGEVRTARALLDRDALKQSLVVAVQDHGQPPLSATVTLTVAVADSIPEVLADLGSLEPSDGPYNYDLTLY

SEQ ID NO: 2858 - protein, 692 aa, synthetic construct
  REGION 1..692: note = PCDHGA8 (Q9Y5G5) SP+PP+ECD
MAAPQSRPRRGELILLCALLGTLWEIGRGQIRYSVPEETDKGSFVGNISKDLGLDPRKLAKHGVRIVSRGRTQLFALNPRSGSLITAGRIDREELCAQSPRCLININTLVEDKGKLFGVEIEIIDINDNNPKFQVEDLEVKINEIAVPGARYPLPEAVDPDVGVNSLQSYQLSPNHHFSLDVQTGDNGAINPELVLERALDREEEAAHHLVLTASDGGKPPRSSTVRIHVTVLDTNDNAPVFPHPIYRVKVLENMPPGTRLLTVTASDPDEGINGKVAYKFRKINEKQTPLFQLNENTGEISIAKSLDYEECSFYEMEIQAEDVGALLGRTKLLISVEDVNDNRPEVIITSLFSPVLENSLPGTVIAFLSVHDQDSGKNGQVVCYTRDNLPFKLEKSIGNYYRLVTRKYLDRENVSIYNITVMASDLGTPPLSTETQIALHVADINDNPPTFPHASYSAYILENNLRGASIFSLTAHDPDSQENAQVTYSVTEDTLQGAPLSSYISINSDTGVLYALQSFDYEQIRDLQLLVTASDSGDPPLSSNMSLSLFVLDQNDNAPEILYPALPTDGSTGVELAPRSAERGYLVTKVVAVDRDSGQNAWLSYRLLKASEPGLFSVGLHTGEVRTARALLDRDALKQSLVVAVQDHGQPPLSATVTLTVAVADSIPEVLTELGSLKPSVDPNDSSLTLY

SEQ ID NO: 2859 - protein, 692 aa, synthetic construct
  REGION 1..692: note = PCDHGA9 (Q9Y5G4) SP+PP+ECD
MAAPTKCQLRGRLVLLCSLLGMLWEARASQIRYSVPEETEKGYIVGNISKDLALEPRELAERRVRIVSRGRTQLFSLNPRSGTLVTAGRIDREELCAQSPRCLVNFKVLVEDRVKLYGIEIEVTDINDSAPKFQAESLEVKINEIAVPGARYPLPEAIDPDVGVNSLQSYQLSPNHHFSLNVQTGDNGAINPELVLERALDREEATAHHLVLTASDGGEPRRSSTVRIHVTVLDTNDNAPVFAQRIYRVKVLENVPPGTWLLTATASDLDEGINGKVAYKFWKINEKQSLLFQLNENTGEISTAKSLDYEECSFYEMEIQAEDGGGLKGWTKVLISVEDVNDNRPEVTITSLFSPVREDAPQGTVILLFNAHDRDSGKNGQVVCSIQENLSFTLENSEEDYYRLLTAQILDREKASEYNITVTATDRGTPPLSTEIHITLQVTDINDNPPAFSQASYSVYLPENNARGTSIFSVIAYDPDSNENSRVIYSLAEDTIQGSPLSTYVSINSDTGVLYALCSFDYEQFRDLQMQVTASDSGSPPLSSNVSLRLFVLDQNDNAPEILYPALPTDGSTGVELAPRSAEPGYLVTKVVAVDRDSGQNAWLSYRLFKASEPGLFSVGLHTGEVRTARALLDRDALKQSLVVAVQDHGQPPLSATVTLTVAIADSIPDILADLGSLQIPADLEASDLTLY

SEQ ID NO: 2860 - protein, 687 aa, synthetic construct
  REGION 1..687: note = PCDHGB1 (Q9Y5G3) SP+PP+ECD
MQRAREAEMMKSQVLFPFLLSLFCGAISQQIRYTIPEELANGSRVGKLAKDLGLSVRELPTRKLRVSAEDYFNVSLESGDLLVNGRIDREKICGRKLECALEFETVAENPMNVFHVVVVIQDINDNAPRFVAKGIDLEICESALPGVKFSLDSAQDADVEGNSLKLYTINPNQYFSLSTKESPDGSKYPVLLLEKPLDREHQSSHRLILTAMDGGDPPLSGTTHIWIRVTDANDNAPVFSQEVYRVSLQENVPWGTSVLRVMATDQDEGINAEITYAFLNSPISTSLFNLNPNTGDITTNGTLDFEETSRYVLSVEAKDGGVHTAHCNVQIEIVDENDNAPEVTFMSFSNQIPEDSDLGTVIALIKVRDKDSGQNGMVTCYTQEEVPFKLESTSKNYYKLVIAGALNREQTADYNVTIIATDKGKPALSSRTSITLHISDINDNAPVFHQASYVVHVSENNPPGASIAQVSASDPDLGPNGRVSYSILASDLEPRELLSYVSVSPQSGVVFAQRAFDHEQLRAFELTLQARDQGSPALSANVSLRVLVGDLNDNAPRVLYPALGPDGSALFDMVPRAAEPGYLVTKVVAVDADSGHNAWLSYHVLQASEPGLFSLGLRTGEVRTARALGDRDAARQRLLVAVRDGGQPPLSATATLHLIFADSLQEVLPDLSDRPEPSDPQTELQFY

SEQ ID NO: 2861 - protein, 691 aa, synthetic construct
  REGION 1..691: note = PCDHGB2 (Q9Y5G2) SP+PP+ECD
MKASSGRCGLVRWLQVLLPFLLSLFPGALPVQIRYSIPEELAKNSVVGNLAKDLGLSVRDLPARKLRVSAEKEYFTVNPESGDLLVSDRIDREQICGKQPLCVLDFDTVAENPLNIFYIAVIVQDINDNTPLFKQTKINLKIGESTKPGTTFPLDPALDSDVGPNSLQRYHLNDNEYFDLAEKQTPDGRKYPELILKHSLDREEHSLHQLVLTAVDGGDPPQSGTTQIRIKVTDANDNPPVFSQDVYRVTLREDVPPGFFVLQVTATDRDEGINAEITYSFHNVDEQVKHFFNLNEKTGEITTKDDLDFEIASSYTLSIEAKDPGDLAAHCSIQVEILDDNDCAPEVIVTSVSTPLPEDSPPGTVIALIKTRDRDSGENGEVYCQVLGNAKFILKSSSKNYYKLVTDGALDREEIPEYNLTITATDGGKPPLSSSIIVTLHISDVNDNAPVFQQTSYMVHVAENNPPGASIAQISASDPDLGPSGQVSYSIVASDLKPREILSYVSVSAQSGVVFAQRAFDHEQLRAFELTLQARDQGSPALSANVSLRVLVGDLNDNAPRVLYPALGPDGSALFDMVPRAAEPGYLVTKVVAVDADSGHNAWLSYHVLQASEPGLFSLGLRTGEVRTARALGDRDAARQRLLVAVRDGGQPPLSATATLHLIFADSLQEVLPDLSDRREPSDPQAKLQFY

SEQ ID NO: 2862 - protein, 691 aa, synthetic construct
  REGION 1..691: note = PCDHGB3 (Q9Y5G1) SP+PP+ECD
MGNSSGWRGPAGQRRMLFLFLLSLLDQALSEPIRYAIPEELDRGSLVGNLAKDLGFGVGDLPTRNLRVIAEKKFFTVSPENGNLLVSDRIDREEICGKKSTCVLEFEMVAEKPLNFFHVTVLIQDINDNPPTFSQNITELEISELALTGATFALESAQDPDVGVNSLQQYYLSPDPHFSLIQKENLDGSRYPELVLKAPLDREEQPHHHLVLTAVDGGEPSRSCTTQIRVIVADANDNPPVFTQDMYRVNVAENLPAGSSVLKVMAIDMDEGINAEIIYAFINIGKEVRQLFKLDSKTGELTTIGELDFEERDSYTIGVEAKDGGHHTAYCKVQIDISDENDNAPEITLASESQHIQEDAELGTAVALIKTHDLDSGFNGEILCQLKGNFPFKIVQDTKNTYRLVTDGALDREQIPEYNVTITATDKGNPPLSSSKTITLHILDVNDNVPVFHQASYTVHVAENNPPGASIAHVRASDPDLGPNGLVSYYIVASDLEPRELSSYVSVSARSGVVFAQRAFDHEQLRAFELTLQARDQGSPTLSANVSLRVLVDDRNDNAPLVLYPALGPEGSALFDMVPRSAEPGYLVTKVVAVDADSGYNAWLSYHIVQASEPGLFSLGLRTGEVRTARTLGDREAARQRLLVTVRDGGQQPLSATVMLHLIFADSLQEIQPDLSDRPTPSDPQAELQFH

SEQ ID NO: 2863 - protein, 689 aa, synthetic construct
  REGION 1..689: note = PCDHGB4 (Q9UN71) SP+PP+ECD
MGSGAGELGRAERLPVLFLFLLSLFCPALCEQIRYRIPEEMPKGSVVGNLATDLGFSVQELPTRKLRVSSEKPYFTVSAESGELLVSSRLDREEICGKKPACALEFEAVAENPLNFYHVNVEIEDINDHTPKFTQNSFELQISESAQPGTRFILGSAHDADIGSNTLQNYQLSPSDHFSLINKEKSDGSKYPEMVLKTPLDREKQKSYHLTLTALDFGAPPLSSTAQIHVLVTDANDNAPVFSQDVYRVSLSENVYPGTTVLQVTATDQDEGVNAEITFSFSEASQITQFDLNSNTGEITVLNTLDFEEVKEYSIVLEARDGGGMIAQCTVEVEVIDENDNAPEVIFQSLPNLIMEDAELGTHIALLKVRDKDSRHNGEVTCKLEGDVPFKILTSSRNTYKLVTDAVLDREQNPEYNITVTATDRGKPPLSSSSSITLHIGDVNDNAPVFSQSSYIVHVAENNPPGASISQVRASDPDLGPNGQVSYCIMASDLEQRELSSYVSISAESGVVFAQRAFDHEQLRAFELTLQARDQGSPALSANVSLRVLVDDRNDNAPRVLYPALGPDGSALFDMVPHAAEPGYLVTKVVAVDADSGHNAWLSYHVLQASEPGLFSLGLRTGEVRTARALGDRDAVRQRLLVAVRDGGQPPLSATATLHLVFADSLQEVLPDITDRPDPSDLQAELQFY

SEQ ID NO: 2864 - protein, 687 aa, synthetic construct
  REGION 1..687: note = PCDHGB5 (Q9Y5G0) SP+PP+ECD
MGSGAGELGRAERLPVLFLFLLSLFCPALCEQIRYRIPEEMPKGSVVGNLATDLGFSVQELPTRKLRVSSEKPYFTVSAESGELLVSSRLDREEICGKKPACALEFEAVAENPLNFYHVNVEIEDINDHTPKFTQNSFELQISESAQPGTRFILEVAEDADIGLNSLQKYKLSLNPSFSLIIKEKQDGSKYPELALEKTLDREQQSYHRLVLTALDGGHPPLSGTTELRIQVTDANDNPPVFNRDVYRVSLRENVPPGTTVLQVSATDQDEGINSEITYSFYRTGQIFSLNSKSGEITTQKKLDFEETKEYSMVVEGRDGGGLVAQCTVEINIQDENDNSPEVTFHSLLEMILENAVPGTLIALIKIHDQDSGENGEVNCQLQGEVPFKIISSSKNSYKLVTDGTLDREQTPEYNVTITATDRGKPPLSSSISVILHIRDVNDNAPVFHQASYLVSVPENNPPGASIAQVCASDLDLGLNGQVSYSIMASDLEPLALASYVSMSAQSGVVFAQRAFDYEQLRTFELTLQARDQGSPALSANVSLRVLVGDRNDNAPRVLYPALGPDGSALFDMVPRAAEPGYLVTKVVAVDADSGHNAWLSYHVLQASEPGLFSLGLRTGEVRTARALGDRDAARQRLLVAVRDGGQPPLSATATLHLVFADSLQEVLPDITDRPVPSDPQAELQFY

SEQ ID NO: 2865 - protein, 691 aa, synthetic construct
  REGION 1..691: note = PCDHGB6 (Q9Y5F9) SP+PP+ECD
MGGSCAQRRRAGPRQVLFPLLLPLFYPTLSEPIRYSIPEELAKGSVVGNLAKDLGLSVLDVSARKLRVSAEKLHFSVDAESGDLLVKNRIDREQICKERRRCELQLEAVVENPLNIFHVIVVIEDVNDHAPQFDKKEIHLEIFESASAGTRLSLDPATDPDININSIKDYKINSNPYFSLMVRVNSDGGKYPELSLEKLLDREEQRSHSLILTALDGGDPPRSATAHIEISVKDTNDNPPVFSRDEYRISLSENLPPGSPVLQVTATDQDEGVNAEINYYFRSTAQSTKHMFSLDEKTGMIKNNQSFDFEDVERYTMEVEAKDGGGLSTQCKVIIEILDENDNSPEIIITSLSDQILENSPPGMVVALFKTRDLDFGGNGEVRCNIETDIPFKIYSSSNNYYKLVTDGALDREQTPEYNVTIVATDRGKPPLSSSRSITLYVADINDNAPVFDQTSYVVHVAENNPPGASIAQVSASDPDLGLNGHISYSIVASDLEPLAVSSYVSVSAQSGVVFAQRAFDHEQLRAFALTLQARDHGSPTLSANVSLRVLVGDRNDNAPRVLYPALGPDGSAFFDMVPRSAEPGYLVTKVVAVDADSGHNAWLSYHVLQASEPGLFSLGLRTGEVRTARALGDRDAARQRLLVAVRDGGQPPLSATATLHLVFADNLQEILPDLSDRPVLSDPQAELQFY

SEQ ID NO: 2866 - protein, 691 aa, synthetic construct
  REGION 1..691: note = PCDHGB7 (Q9Y5F8) SP+PP+ECD
MGGSCAQRRRAGPRQVLFPLLLPLFYPTLCEPIRYSIPEELAKGSVVGNLAKDLGLSVLDVSARELRVSAEKLHFSVDAQSGDLLVKDRIDREQICKERRRCELQLEAVVENPLNIFHVIVVIEDVNDHAPQFRKDEINLEISESVSLGMGTILESAEDPDISMNSLSKYQLSPNEYFSLVEKDNPDGGKYPELVLQKTLDRETQSAHHLVLTALDGGDPPRSGTAQIRILVIDANDNPPVFSQDVYRVSLREDVPPGTSILRVKATDQDEGINSEITYSFFGVADKAQHVFSLDYTTGNILTQQPLDFEEVERYTINIEAKDRGSLSTRCKVIVEVVDENDNSPEIIITSLSDQIMEDSPPGVVVALFKTRDQDSGENGEVRCSLSRGVPFKIHSSSNNYYKLVTDEALDREQTPEYNVTIAATDRGKPPLSSSKTITLHITDVNDNAPVFGQSAYLVHVPENNQPGASIAQVSASDPDFGLNGRVSYSLIASDLESRTLSSYVSVSAQSGVVFAQRAFDHEQLRTFELTLQARDQGSPALSANVSLRVLVGDRNDNAPRVLYPALGPDGSALFDTVPRAAQPGYLVTKVVAVDADSGHNAWLSYHVVQASEPGLFSLGLRTGEVRMVRALGDKDSVRQRLLVAVRDGGQPPLSATATLHLVFADSLQEVLPDFSDHPTPSDSQAEMQFY

SEQ ID NO: 2867 - protein, 693 aa, synthetic construct
  REGION 1..693: note = PCDHGC3 (Q9UN70) SP+PP+ECD
MVPEAWRSGLVSTGRVVGVLLLLGALNKASTVIHYEIPEEREKGFAVGNVVANLGLDLGSLSARRFRVVSGASRRFFEVNRETGEMFVNDRLDREELCGTLPSCTVTLELVVENPLELFSVEVVIQDINDNNPAFPTQEMKLEISEAVAPGTRFPLESAHDPDVGSNSLQTYELSRNEYFALRVQTREDSTKYAELVLERALDREREPSLQLVLTALDGGTPALSASLPIHIKVLDANDNAPVFNQSLYRARVLEDAPSGTRVVQVLATDLDEGPNGEIIYSFGSHNRAGVRQLFALDLVTGMLTIKGRLDFEDTKLHEIYIQAKDKGANPEGAHCKVLVEVVDVNDNAPEITVTSVYSPVPEDAPLGTVIALLSVTDLDAGENGLVTCEVPPGLPFSLTSSLKNYFTLKTSADLDRETVPEYNLSITARDAGTPSLSALTIVRVQVSDINDNPPQSSQSSYDVYIEENNLPGAPILNLSVWDPDAPQNARLSFFLLEQGAETGLVGRYFTINRDNGIVSSLVPLDYEDRREFELTAHISDGGTPVLATNISVNIFVTDRNDNAPQVLYPRPGGSSVEMLPRGTSAGHLVSRVVGWDADAGHNAWLSYSLLGSPNQSLFAIGLHTGQISTARPVQDTDSPRQTLTVLIKDNGEPSLSTTATLTVSVTEDSPEARAEFPSGSAPREQKKNLTFY

SEQ ID NO: 2868 - protein, 692 aa, synthetic construct
  REGION 1..692: note = PCDHGC4 (Q9Y5F7) SP+PP+ECD
MLRKVRSWTEIWRWATLLFLFYHLGYVCGQIRYPVPEESQEGTFVGNVAQDFLLDTDSLSARRLQVAGEVNQRHFRVDLDSGALLIKNPIDREALCGLSASCIVPLEFVTEGPLEMYRAEVEIVDVNDHAPRFPRQQLDLEIGEAAPPGQRFPLEKAQDADVGSNSISSYRLSSNEHFALDVKKRSDGSLVPELLLEKPLDREKQSDYRLVLTAVDGGNPPRSGTAELRVSVLDVNDNAPAFQQSSYRISVLESAPAGMVLIQLNASDPDLGPSGNVTFYFSGHTPDRVRNLFSLHPTTGKLTLLGPLDFESENYYEFDVRARDGGSPAMEQHCSLRVDLLDVNDNAPYITVTSELGTLPESAEPGTVVALISVQDPDSGSNGDVSLRIPDHLPFALKSAFRNQFSLVTAGPLDREAKSSYDIMVTASDAGNPPLSTHRTIFLNISDVNDNPPSFFQRSHEVFVPENNRPGDLLCSLAASDPDSGLNALISYSLLEPRNRDVSASSFISLNPQTGAVHATRSFDYEQTQTLQFEVQARDRGNPPLSSTVTVRLFVLDLNDNAPAVLRPRARPGSLCPQALPPSVGAGHLITKVTAVDLDSGYNAWVSYQLLEAPDPSLFAVSRYAGEVRTAVPIPADLPPQKLVIVVKDSGSPPLSTSVTLLVSLEEDTHPVVPDLRESSAPREGESRLTLY

SEQ ID NO: 2869 - protein, 693 aa, synthetic construct
  REGION 1..693: note = PCDHGC5 (Q9Y5F6) SP+PP+ECD
MGPKTLPQLAGKWQVLCMLSLCCWGWVSGQLRYSVVEESEPGTLVGNVAQDLGLKMTDLLSRRLQLGSEENGRYFSLSLMSGALAVNQKIDRESLCGASTSCLLPVQVVTEHPLELIRVEVEILDLNDNSPSFATPEREMRISESAASGARFPLDSAQDPDVGTNTVSFYTLSPNSHFSLNVKTLKDGKPFPELVLEQQLDREAQARHQLVLTAVDGGTPARSGTTLISVIVLDINDNAPTFQSSVLRVGIPENAPIGTLLLRLNATDPDEGTNGQLDYSFGDHTSEAVRNLFGLDPSSGAIHVLGPIDFEESRFYEIHARARDQGQPAMEGHCVIQVDVGDVNDNAPEVLLASLANPVLESTPVGTVVGLFNVRDRDSGRNGEVSLDISPDLPFQIKPSENHYSLLTSQPLDREATSHYIIELLASDAGSPSLHKHLTIRLNISDVNDNAPRFNQQLYTAYILENRPPGSLLCTVAASDPDTGDNARLTYSIVGNQVQGAPASSFVYVNPEDGRIFAQRTFDYELLQMLQIVVGVRDSGSPPLHANTSLHVFVLDENDNAPAVLHPRPDWEHSAPQRLPRSAPPGSLVTKVTAVDADAGHNAWLSYSLLPQSTAPGLFLVSTHTGEVRTARALLEDDSDTQQVVVLVRDNGDPSLSSTATVLLVLEDEDPEEMPKSSDFLIHPPERSDLTLY

SEQ ID NO: 2870 - protein, 1743 aa, synthetic construct
  REGION 1..1743: note = PCSK5 (Q92824) SP+PP+ECD
MGWGSRCCCPGRLDLLCVLALLGGCLLPVCRTRVYTNHWAVKIAGGFPEANRIASKYGFINIGQIGALKDYYHFYHSRTIKRSVISSRGTHSFISMEPKVEWIQQQVVKKRTKRDYDFSRAQSTYFNDPKWPSMWYMHCSDNTHPCQSDMNIEGAWKRGYTGKNIVVTILDDGIERTHPDLMQNYDALASCDVNGNDLDPMPRYDASNENKHGTRCAGEVAAAANNSHCTVGIAFNAKIGGVRMLDGDVTDMVEAKSVSFNPQHVHIYSASWGPDDDGKTVDGPAPLTRQAFENGVRMGRRGLGSVFVWASGNGGRSKDHCSCDGYTNSIYTISISSTAESGKKPWYLEECSSTLATTYSSGESYDKKIITTDLRQRCTDNHTGTSASAPMAAGIIALALEANPFLTWRDVQHVIVRTSRAGHLNANDWKTNAAGFKVSHLYGFGLMDAEAMVMEAEKWTTVPRQHVCVESTDRQIKTIRPNSAVRSIYKASGCSDNPNRHVNYLEHVVVRITITHPRRGDLAIYLTSPSGTRSQLLANRLFDHSMEGFKNWEFMTIHCWGERAAGDWVLEVYDTPSQLRNFKTPGKLKEWSLVLYGTSVQPYSPTNEFPKVERFRYSRVEDPTDDYGTEDYAGPCDPECSEVGCDGPGPDHCNDCLHYYYKLKNNTRICVSSCPPGHYHADKKRCRKCAPNCESCFGSHGDQCMSCKYGYFLNEETNSCVTHCPDGSYQDTKKNLCRKCSENCKTCTEFHNCTECRDGLSLQGSRCSVSCEDGRYFNGQDCQPCHRFCATCAGAGADGCINCTEGYFMEDGRCVQSCSISYYFDHSSENGYKSCKKCDISCLTCNGPGFKNCTSCPSGYLLDLGMCQMGAICKDGEYVDEHGHCQTCEASCAKCQGPTQEDCTTCPMTRIFDDGRCVSNCPSWKFEFENQCHPCHHTCQRCQGSGPTHCTSCGADNYGREHFLYQGECGDSCPEGHYATEGNTCLPCPDNCELCHSVHVCTRCMKGYFIAPTNHTCQKLECGQGEVQDPDYEECVPCEEGCLGCSLDDPGTCTSCAMGYYRFDHHCYKTCPEKTYSEEVECKACDSNCGSCDQNGCYWCEEGFFLLGGSCVRKCGPGFYGDQEMGECESCHRACETCTGPGHDECSSCQEGLQLLRGMCVHATKTQEEGKFWNDILRKLQPCHSSCKTCNGSATLCTSCPKGAYLLAQACVSSCPQGTWPSVRSGSCENCTEACAICSGADLCKKCQMQPGHPLFLHEGRCYSKCPEGSYAEDGICERCSSPCRTCEGNATNCHSCEGGHVLHHGVCQENCPERHVAVKGVCKHCPEMCQDCIHEKTCKECTPEFFLHDDMCHQSCPRGFYADSRHCVPCHKDCLECSGPKADDCELCLESSWVLYDGLCLEECPAGTYYEKETKECRDCHKSCLTCSSSGTCTTCQKGLIMNPRGSCMANEKCSPSEYWDEDAPGCKPCHVKCFHCMGPAEDQCQTCPMNSLLLNTTCVKDCPEGYYADEDSNRCAHCHSSCRTCEGRHSRQCHSCRPGWFQLGKECLLQCREGYYADNSTGRCERCNRSCKGCQGPRPTDCLSCDRFFFLLRSKGECHRSCPDHYYVEQSTQTCERCHPTCDQCKGKGALNCLSCVWSYHLMGGICTSDCLVGEYRVGEGEKFNCEKCHESCMECKGPGAKNCTLCPANLVLHMDDSHCLHCCNTSDPPSAQECCDCQDTTDECILRTSKVRPATEHFKT

SEQ ID NO: 2871 - protein, 170 aa, synthetic construct
  REGION 1..170: note = PDCD1 (Q15116) SP+PP+ECD
MQIPQAPWPVVWAVLQLGWRPGWFLDSPDRPWNPPTFSPALLVVTEGDNATFTCSFSNTSESFVLNWYRMSPSNQTDKLAAFPEDRSQPGQDCRFRVTQLPNGRDFHMSVVRARRNDSGTYLCGAISLAPKAQIKESLRAELRVTERRAEVPTAHPSPSPRPAGQFQTLV

SEQ ID NO: 2872 - protein, 220 aa, synthetic construct
  REGION 1..220: note = PDCD1LG2 (Q9BQ51) SP+PP+ECD
MIFLLLMLSLELQLHQIAALFTVTVPKELYIIEHGSNVTLECNFDTGSHVNLGAITASLQKVENDTSPHRERATLLEEQLPLGKASFHIPQVQVRDEGQYQCIIIYGVAWDYKYLTLKVKASYRKINTHILKVPETDEVELTCQATGYPLAEVSWPNVSVPANTSHSRTPEGLYQVTSVLRLKPPPGRNFSCVFWNTHVRELTLASIDLQSQMEPRTHPT

SEQ ID NO: 2873 - protein, 528 aa, synthetic construct
  REGION 1..528: note = PDGFRA (P16234) SP+PP+ECD
MGTSHPAFLVLGCLLTGLSLILCQLSLPSILPNENEKVVQLNSSFSLRCFGESEVSWQYPMSEEESSDVEIRNEENNSGLFVTVLEVSSASAAHTGLYTCYYNHTQTEENELEGRHIYIYVPDPDVAFVPLGMTDYLVIVEDDDSAIIPCRTTDPETPVTLHNSEGVVPASYDSRQGFNGTFTVGPYICEATVKGKKFQTIPFNVYALKATSELDLEMEALKTVYKSGETIVVTCAVFNNEVVDLQWTYPGEVKGKGITMLEEIKVPSIKLVYTLTVPEATVKDSGDYECAARQATREVKEMKKVTISVHEKGFIEIKPTFSQLEAVNLHEVKHFVVEVRAYPPPRISWLKNNLTLIENLTEITTDVEKIQEIRYRSKLKLIRAKEEDSGHYTIVAQNEDAVKSYTFELLTQVPSSILDLVDDHHGSTGGQTVRCTAEGTPLPDIEWMICKDIKKCNNETSWTILANNVSNIITEIHSRDRSTVEGRVTFAKVEETIAVRCLAKNLLGAENRELKLVAPTLRSELTVA

SEQ ID NO: 2874 - protein, 532 aa, synthetic construct
  REGION 1..532: note = PDGFRB (P09619) SP+PP+ECD
MRLPGAMPALALKGELLLLSLLLLLEPQISQGLVVTPPGPELVLNVSSTFVLTCSGSAPVVWERMSQEPPQEMAKAQDGTFSSVLTLTNLTGLDTGEYFCTHNDSRGLETDERKRLYIFVPDPTVGFLPNDAEELFIFLTEITEITIPCRVTDPQLVVTLHEKKGDVALPVPYDHQRGFSGIFEDRSYICKTTIGDREVDSDAYYVYRLQVSSINVSVNAVQTVVRQGENITLMCIVIGNEVVNFEWTYPRKESGRLVEPVTDFLLDMPYHIRSILHIPSAELEDSGTYTCNVTESVNDHQDEKAINITVVESGYVRLLGEVGTLQFAELHRSRTLQVVFEAYPPPTVLWFKDNRTLGDSSAGEIALSTRNVSETRYVSELTLVRVKVAEAGHYTMRAFHEDAEVQLSFQLQINVPVRVLELSESHPDSGEQTVRCRGRGMPQPNIIWSACRDLKRCPRELPPTLLGNSSEEESQLETNVTYWEEEQEFEVVSTLRLQHVDRPLSVRCTLRNAVGQDTQEVIVVPHSLPFKV

SEQ ID NO: 2875 - protein, 755 aa, synthetic construct
  REGION 1..755: note = PEAR1 (Q5VY43) SP+PP+ECD
MSPPLCPLLLLAVGLRLAGTLNPSDPNTCSFWESFTTTTKESHSRPFSLLPSEPCERPWEGPHTCPQPTVVYRTVYRQVVKTDHRQRLQCCHGFYESRGFCVPLCAQECVHGRCVAPNQCQCVPGWRGDDCSSECAPGMWGPQCDKPCSCGNNSSCDPKSGVCSCPSGLQPPNCLQPCTPGYYGPACQFRCQCHGAPCDPQTGACFCPAERTGPSCDVSCSQGTSGFFCPSTHSCQNGGVFQTPQGSCSCPPGWMGTICSLPCPEGFHGPNCSQECRCHNGGLCDRFTGQCRCAPGYTGDRCREECPVGRFGQDCAETCDCAPDARCFPANGACLCEHGFTGDRCTDRLCPDGFYGLSCQAPCTCDREHSLSCHPMNGECSCLPGWAGLHCNESCPQDTHGPGCQEHCLCLHGGVCQATSGLCQCAPGYTGPHCASLCPPDTYGVNCSARCSCENAIACSPIDGECVCKEGWQRGNCSVPCPPGTWGFSCNASCQCAHEAVCSPQTGACTCTPGWHGAHCQLPCPKGQFGEGCASRCDCDHSDGCDPVHGRCQCQAGWMGARCHLSCPEGLWGVNCSNTCTCKNGGTCLPENGNCVCAPGFRGPSCQRSCQPGRYGKRCVPCKCANHSFCHPSNGTCYCLAGWTGPDCSQPCPPGHWGENCAQTCQCHHGGTCHPQDGSCICPLGWTGHHCLEGCPLGTFGANCSQPCQCGPGEKCHPETGACVCPPGHSGAPCRIGIQEPFTVMPTTPVAYNSL

SEQ ID NO: 2876 - protein, 601 aa, synthetic construct
  REGION 1..601: note = PECAM1 (P16284) SP+PP+ECD
MQPRWAQGATMWLGVLLTLLLCSSLEGQENSFTINSVDMKSLPDWTVQNGKNLTLQCFADVSTTSHVKPQHQMLFYKDDVLFYNISSMKSTESYFIPEVRIYDSGTYKCTVIVNNKEKTTAEYQVLVEGVPSPRVTLDKKEAIQGGIVRVNCSVPEEKAPIHFTIEKLELNEKMVKLKREKNSRDQNFVILEFPVEEQDRVLSFRCQARIISGIHMQTSESTKSELVTVTESFSTPKFHISPTGMIMEGAQLHIKCTIQVTHLAQEFPEIIIQKDKAIVAHNRHGNKAVYSVMAMVEHSGNYTCKVESSRISKVSSIVVNITELFSKPELESSFTHLDQGERLNLSCSIPGAPPANFTIQKEDTIVSQTQDFTKIASKSDSGTYICTAGIDKVVKKSNTVQIVVCEMLSQPRISYDAQFEVIKGQTIEVRCESISGTLPISYQLLKTSKVLENSTKNSNDPAVFKDNPTEDVEYQCVADNCHSHAKMLSEVLRVKVIAPVDEVQISILSSKVVESGEDIVLQCAVNEGSGPITYKFYREKEGKPFYQMTSNATQAFWTKQKASKEQEGEYYCTAFNRANHASSVPRSKILTVRVILAPWKK

SEQ ID NO: 2877 - protein, 427 aa, synthetic construct
  REGION 1..427: note = PI16 (Q6UXB8) SP+PP+ECD
MHGSCSFLMLLLPLLLLLVATTGPVGALTDEEKRLMVELHNLYRAQVSPTASDMLHMRWDEELAAFAKAYARQCVWGHNKERGRRGENLFAITDEGMDVPLAMEEWHHEREHYNLSAATCSPGQMCGHYTQVVWAKTERIGCGSHFCEKLQGVEETNIELLVCNYEPPGNVKGKRPYQEGTPCSQCPSGYHCKNSLCEPIGSPEDAQDLPYLVTEAPSFRATEASDSRKMGTPSSLATGIPAFLVTEVSGSLATKALPAVETQAPTSLATKDPPSMATEAPPCVTTEVPSILAAHSLPSLDEEPVTFPKSTHVPIPKSADKVTDKTKVPSRSPENSLDPKMSLTGARELLPHAQEEAEAEAELPPSSEVLASVFPAQDKPGELQATLDHTGHTSSKSLPNFPNTSATANATGGRALALQSSLPGAEG

SEQ ID NO: 2878 - protein, 638 aa, synthetic construct
  REGION 1..638: note = PIGR (P01833) SP+PP+ECD
MLLFVLTCLLAVFPAISTKSPIFGPEEVNSVEGNSVSITCYYPPTSVNRHTRKYWCRQGARGGCITLISSEGYVSSKYAGRANLTNFPENGTFVVNIAQLSQDDSGRYKCGLGINSRGLSFDVSLEVSQGPGLLNDTKVYTVDLGRTVTINCPFKTENAQKRKSLYKQIGLYPVLVIDSSGYVNPNYTGRIRLDIQGTGQLLFSVVINQLRLSDAGQYLCQAGDDSNSNKKNADLQVLKPEPELVYEDLRGSVTFHCALGPEVANVAKFLCRQSSGENCDVVVNTLGKRAPAFEGRILLNPQDKDGSFSVVITGLRKEDAGRYLCGAHSDGQLQEGSPIQAWQLFVNEESTIPRSPTVVKGVAGGSVAVLCPYNRKESKSIKYWCLWEGAQNGRCPLLVDSEGWVKAQYEGRLSLLEEPGNGTFTVILNQLTSRDAGFYWCLTNGDTLWRTTVEIKIIEGEPNLKVPGNVTAVLGETLKVPCHFPCKFSSYEKYWCKWNNTGCQALPSQDEGPSKAFVNCDENSRLVSLTLNLVTRADEGWYWCGVKQGHFYGETAAVYVAVEERKAAGSRDVSLAKADAAPDEKVLDSGFREIENKAIQDPRLFAEEKAVADTRDQADGSRASVDSGSSEEQGGSSR

SEQ ID NO: 2879 - protein, 527 aa, synthetic construct
  REGION 1..527: note = PIGT (Q969N2) SP+PP+ECD
MAAAMPLALLVLLLLGPGGWCLAEPPRDSLREELVITPLPSGDVAATFQFRTRWDSELQREGVSHYRLFPKALGQLISKYSLRELHLSFTQGFWRTRYWGPPFLQAPSGAELWVWFQDTVTDVDKSWKELSNVLSGIFCASLNFIDSTNTVTPTASFKPLGLANDTDHYFLRYAVLPREVVCTENLTPWKKLLPCSSKAGLSVLLKADRLFHTSYHSQAVHIRPVCRNARCTSISWELRQTLSVVFDAFITGQGKKDWSLFRMFSRTLTEPCPLASESRVYVDITTYNQDNETLEVHPPPTTTYQDVILGTRKTYAIYDLLDTAMINNSRNLNIQLKWKRPPENEAPPVPFLHAQRYVSGYGLQKGELSTLLYNTHPYRAFPVLLLDTVPWYLRLYVHTLTITSKGKENKPSYIHYQPAQDRLQPHLLEMLIQLPANSVTKVSIQFERALLKWTEYTPDPNHGFYVSPSVLSALVPSMVAAKPVDWEESPLFNSLFPVSDGSNYFVRLYTEPLLVNLPTPDFSMPYN

SEQ ID NO: 2880 - protein, 168 aa, synthetic construct
  REGION 1..168: note = PIK3IP1 (Q96FE7) SP+PP+ECD
MLLAWVQAFLVSNMLLAEAYGSGGCFWDNGHLYREDQTSPAPGLRCLNWLDAQSGLASAPVSGAGNHSYCRNPDEDPRGPWCYVSGEAGVPEKRPCEDLRCPETTSQALPAFTTEIQEASEGPGADEVQVFAPANALPARSEAAAVQPVIGISQRVRMNSKEKKDLGT

SEQ ID NO: 2881 - protein, 197 aa, synthetic construct
  REGION 1..197: note = PILRA (Q9UKJ1) SP+PP+ECD
MGRPLLLPLLPLLLPPAFLQPSGSTGSGPSYLYGVTQPKHLSASMGGSVEIPFSFYYPWELATAPDVRISWRRGHFHRQSFYSTRPPSIHKDYVNRLFLNWTEGQKSGFLRISNLQKQDQSVYFCRVELDTRSSGRQQWQSIEGTKLSITQAVTTTTQRPSSMTTTWRLSSTTTTTGLRVTQGKRRSDSWHISLETA

SEQ ID NO: 2882 - protein, 191 aa, synthetic construct
  REGION 1..191: note = PILRB (Q9UKJ0) SP+PP+ECD
MGRPLLLPLLLLLQPPAFLQPGGSTGSGPSYLYGVTQPKHLSASMGGSVEIPFSFYYPWELAIVPNVRISWRRGHFHGQSFYSTRPPSIHKDYVNRLFLNWTEGQESGFLRISNLRKEDQSVYFCRVELDTRRSGRQQLQSIKGTKLTITQAVTTTTTWRPSSTTTIAGLRVTESKGHSESWHLSLDTAIR

SEQ ID NO: 2883 - protein, 3858 aa, synthetic construct
  REGION 1..3858: note = PKHD1 (P08F94) SP+PP+ECD
MTAWLISLMSIEVLLLAVRHLSLHIEPEEGSLAGGTWITVIFDGLELGVLYPNNGSQLEIHLVNVNMVVPALRSVPCDVFPVFLDLPVVTCRTRSVLSEAHEGLYFLEAYFGGQLVSSPNPGPRDSCTFKFSKAQTPIVHQVYPPSGVPGKLIHVYGWIITGRLETFDFDAEYIDSPVILEAQGDKWVTPCSLINRQMGSCYPIQEDHGLGTLQCHVEGDYIGSQNVSFSVFNKGKSMVHKKAWLISAKQDLFLYQTHSEILSVFPETGSLGGRTNITITGDFFDNSAQVTIAGIPCDIRHVSPRKIECTTRAPGKDVRLTTPQPGNRGLLFEVGDAVEGLELTEATPGYRWQIVPNASSPFGFWSQEGQPFRARLSGFFVAPETNNYTFWIQADSQASLHFSWSEEPRTKVKVASISVGTADWFDSWEQNRDEGTWQQKTPKLELLGGAMYYLEAEHHGIAPSRGMRIGVQIHNTWLNPDVVTTYLREKHQIRVRAQRLPEVQVLNVSGRGNFFLTWDNVSSQPIPANATAHLIQTTIEELLAVKCKLEPLWSNILLRLGFERGPEVSNSDGDLTSGTEPFCGRFSLRQPRHLVLTPPAAQKGYRLDQYTHLCLAYKGHMNKILKMIVSFTIGFQNMVKNTTCDWSLTRTSPESWQFDCTDLWETCVRCFGDLQPPPANSPVLVHQINLLPLAQETGLFYVDEIIIADTNVTVSQADSGTARPGGNLVESVSVVGSPPVYSVTSWLAGCGTELPLITARSVPTEGTEEGSGLVLVTTQRRQRTSPPLGGHFRIQLPNTVISDVPVQISAHHLHQLLQNNADDFTSRYLNASDFTVKEDLYTCYEHVWTLSWSTQIGDLPNFIRVSDENLTGVNPAAATRVVYDGGVFLGPIFGDMLATANQHTQVVVRVNDVPAHCPGSCSFQYLQGSTPCVHSVWYSIDGDINLMIYITGTGFSGDSQFLQVTVNKTSCKVIFSNQTNVVCQTDLLPVGMHRILMLVRPSGLAISATGEDLFLNVKPRLDMVEPSRAADIGGLWATIRGSSLEGVSLILFGSYSCAINVATSNSSRIQCKVPPRGKDGRIVNVTVIRGDYSAVLPRAFTYVSSLNPVIVTLSRNISNIAGGETLVIGVARLMNYTDLDVEVHVQDALAPVHTQSAWGLEVALPPLPAGLHRISVSINGVSIHSQGVDLHIQYLTEVFSIEPCCGSLLGGTILSISGIGFSRDPALVWVLVGNRSCDIVNLTEASIWCETLPAPQIPDAGAPTVPAAVEVWAGNRFFARGPSPSLVGKGFTFMYEAAATPVVTAMQGEITNSSLSLHVGGSNLSNSVILLGNLNCDVETQSFQGNVSLSGCSIPLHSLEAGIYPLQVRQKQMGFANMSVVLQQFAVMPRIMAIFPSQGSACGGTILTVRGLLLNSRRRSVRVDLSGPFTCVILSLGDHTILCQVSLEGDPLPGASFSLNVTVLVNGLTSECQGNCTLFIREEASPVMDALSTNTSGSLTTVLIRGQRLATTADEPMVFVDDQLPCNVTFFNASHVVCQTRDLAPGPHYLSVFYTRNGYACSGNVSRHFYIMPQVFHYFPKNFSLHGGSLLTIEGTGLRGQNTTSVYIDQQTCLTVNIGAELIRCIVPTGNGSVALEIEVDGLWYHIGVIGYNKAFTPELISISQSDDILTFAVAQISGAANIDIFIGMSPCVGVSGNHTVLQCVVPSLPAGEYHVRGYDCIRGWASSALVFTSRVIITAVTENFGCLGGRLVHVFGAGFSPGNVSAAVCGAPCRVLANATVSAFSCLVLPLDVSLAFLCGLKREEDSCEAARHTYVQCDLTVAMATEQLLESWPYLYICEESSQCLFVPDHWAESMFPSFSGLFISPKLERDEVLIYNSSCNITMETEAEMECETPNQPITVKITEIRKRWGQNTQGNFSLQFCRRWSRTHSWFPERLPQDGDNVTVENGQLLLLDTNTSILNLLHIKGGKLIFMAPGPIELRAHAILVSDGGELRIGSEDKPFQGRAQITLYGSSYSTPFFPYGVKFLAVRNGTLSLHGSLPEVIVTCLRATAHALDTVLALEDAVDWNPGDEVVIISGTGVKGAKPMEEIVTVETVQDTDLYLKSPLRYSHNFTENWVAGEHHILKATVALLSRSITIQGNLTNEREKLLVSCQEANAPEGNLQHCLYSMSEKMLGSRDMGARVIVQSFPEEPSQVQLKGVQFQVLGQAFHKHLSSLTLVGAMRESFIQGCTVRNSFSRGLSMCGTLGLKVDSNVFYNILGHALLVGTCTEMRYISWEAIHGRKDDWSGHGNIIRNNVIIQVSGAEGLSNPEMLTPSGIYICSPTNVIEGNRVCGAGYGYFFHLMTNQTSQAPLLSFTQNIAHSCTRYGLFVYPKFQPPWDNVTGTTLFQSFTVWESAGGAQIFRSSNLRLKNFKVYSCRDFGIDVLESDANTSVTDSLLLGHFAHKGSLCMSSGIKTPKRWELMVSNTTFVNFDLINCVAIRTCSDCSQGQGGFTVKTSQLKFTNSSNLVAFPFPHAAILEDLDGSLSGKNRSHILASMETLSASCLVNSSFGRVVHGSACGGGVLFHRMSIGLANTPEVSYDLTMTDSRNKTTTVNYVRDTLSNPRGWMALLLDQETYSLQSENLWINRSLQYSATFDNFAPGNYLLLVHTDLPPYPDILLRCGSRVGLSFPFLPSPGQNQGCDWFFNSQLRQLTYLVSGEGQVQVILRVKEGMPPTISASTSAPESALKWSLPETWQGVEEGWGGYNNTIPGPGDDVLILPNRTVLVDTDLPFFKGLYVMGTLDFPVDRSNVLSVACMVIAGGELKVGTLENPLEKEQKLLILLRASEGVFCDRMNGIHIDPGTIGVYGKVHLYSAYPKNSWTHLGADIASGNERIIVEDAVDWRPHDKIVLSSSSYEPHEAEVLTVKEVKGHHVRIYERLKHRHIGSVHVTEDGRHIRLAAEVGLLTRNIQIQPDVSCRGRLFVGSFRKSSREEFSGVLQLLNVEIQNFGSPLYSSVEFSNVSAGSWIISSTLHQSCGGGIHAAASHGVLLNDNIVFGTAGHGIDLEGQAYTVTNNLVVLMTQPAWSTIWVAGIKVNQVKDINLHGNVVAGSERLGFHIRGHKCSSCELLWSDNVAHSSLHGLHLYKESGLDNCTRISGFLAFKNFDYGAMLHVENSVEIENITLVDNTIGLLAVVYVFSAPQNSVKKVQIVLRNSVIVATSSSFDCIQDKVKPHSANLTSTDRAPSNPRGGRIGILWPVFTSEPNQWPQEPWHKVRNDHSISGIMKLQDVTFSSFVKSCYSDDLDVCILPNAENSGIMHPITAERTRMLKIKDKNKFYFPSLQPRKDLGKVVCPELDCASPRKYLFKDLDGRALGLPPPVSVFPKTEAEWTASFFNAGTFREEQKCTYQFLMQGFICKQTDQVVLILDSADAIWAIQKLYPVVSVTSGFVDVFSSVNANIPCSTSGSVSTFYSILPIRQITKVCFMDQTPQVLRFFLLGNKSTSKLLLAVFYHELQSPHVFLGESFIPPTLVQSASLLLNESIGANYFNIMDNLLYVVLQGEEPIEIRSGVSIHLALTVMVSVLEKGWEIVILERLTNFLQIGQNQIRFIHEMPGHEETLKAIADSRAKRKRNCPTVTCTSHYRRVGQRRPLMMEMNSHRASPPMTVETISKVIVIEIGDSPTVRSTGMISSLSSNKLQNLAHRVITAQQTGVLENVLNMTIGALLVTQSKGVIGYGNTSSFKTGNLIYIRPYALSILVQPSDGEVGNELPVQPQLVFLDEQNRRVESLGPPSEPWTISASLEGASDSVLKGCTQAETQDGYVSFYNLAVLISGSNWHFIFTVTSPPGVNFTARSKPFAVLPVTRKEKST

SEQ ID NO: 2884 - protein, 4210 aa, synthetic construct
  REGION 1..4210: note = PKHD1L1 (Q86WI1) SP+PP+ECD
MGHLWLLGIWGLCGLLLCAADPSTDGSQIIPKVTEIIPKYGSINGATRLTIRGEGFSQANQFNYGVDNAELGNSVQLISSFQSITCDVEKDASHSTQITCYTRAMPEDSYTVRVSVDGVPVTENNTCKGHINSWECTFNAKSFRTPTIRSITPLSGTPGTLITIQGRIFTDVYGSNIALSSNGKNVRILRVYIGGMPCELLIPQSDNLYGLKLDHPNGDMGSMVCKTTGTFIGHHNVSFILDNDYGRSFPQKMAYFVSSLNKIAMFQTYAEVTMIFPSQGSIRGGTTLTISGRFFDQTDFPVRVLVGGEPCDILNVTENSICCKTPPKPHILKTVYPGGRGLKLEVWNNSRPIRLEEILEYNEKTPGYMGASWVDSASYIWLMEQDTFVARFSGFLVAPDSDVYRFYIKGDDRYAIYFSQTGLPEDKVRIAYHSANANSYFSSPTQRSDDIHLQKGKEYYIEILLQEYRLSAFVDVGLYQYRNVYTEQQTGDAVNEEQVIKSQSTILQEVQVITLENWETTNAINEVQKIKVTSPCVEANSCSLYQYRLIYNMEKTVFLPADASEFILQSALNDLWSIKPDTVQVIRTQNPQSYVYMVTFISTRGDFDLLGYEVVEGNNVTLDITEQTKGKPNLETFTLNWDGIASKPLTLWSSEAEFQGAVEEMVSTKCPPQIANFEEGFVVKYFRDYETDFNLEHINRGQKTAETDAYCGRYSLKNPAVLFDSADVKPNRRPYGDILLFPYNQLCLAYKGFLANYIGLKFQYQDNSKITRSTDTQFTYNFAYGNNWTYTCIDLLDLVRTKYTGTNVSLQRISLHKASESQSFYVDVVYIGHTSTISTLDEMPKRRLPALANKGIFLEHFQVNQTKTNGPTMTNQYSVTMTSYNCSYNIPMMAVSFGQIITHETENEFVYRGNNWPGESKIHIQRIQAASPPLSGSFDIQAYGHILKGLPAAVSAADLQFALQSLEGMGRISVTREGTCAGYAWNIKWRSTCGKQNLLQINDSNIIGEKANMTVTRIKEGGLFRQHVLGDLLRTPSQQPQVEVYVNGIPAKCSGDCGFTWDSNITPLVLAISPSQGSYEEGTILTIVGSGFSPSSAVTVSVGPVGCSLLSVDEKELKCQILNGSAGHAPVAVSMADVGLAQNVGGEEFYFVYQSQISHIWPDSGSIAGGTLLTLSGFGFNENSKVLVGNETCNVIEGDLNRITCRTPKKTEGTVDISVTTNGFQATARDAFSYNCLQTPIITDFSPKVRTILGEVNLTIKGYNFGNELTQNMAVYVGGKTCQILHWNFTDIRCLLPKLSPGKHDIYVEVRNWGFASTRDKLNSSIQYVLEVTSMFPQRGSLFGGTEITIRGFGFSTIPAENTVLLGSIPCNVTSSSENVIKCILHSTGNIFRITNNGKDSVHGLGYAWSPPVLNVSVGDTVAWHWQTHPFLRGIGYRIFSVSSPGSVIYDGKGFTSGRQKSTSGSFSYQFTSPGIHYYSSGYVDEAHSIFLQGVINVLPAETRHIPLHLFVGRSEATYAYGGPENLHLGSSVAGCLATEPLCSLNNTRVKNSKRLLFEVSSCFSPSISNITPSTGTVNELITIIGHGFSNLPWANKVTIGSYPCVVEESSEDSITCHIDPQNSMDVGIRETVTLTVYNLGTAINTLSNEFDRRFVLLPNIDLVLPNAGSTTGMTSVTIKGSGFAVSSAGVKVLMGHFPCKVLSVNYTAIECETSPAAQQLVDVDLLIHGVPAQCQGNCTFSYLESITPYITGVFPNSVIGSVKVLIEGEGLGTVLEDIAVFIGNQQFRAIEVNENNITALVTPLPVGHHSVSVVVGSKGLALGNLTVSSPPVASLSPTSGSIGGGTTLVITGNGFYPGNTTVTIGDEPCQIISINPNEVYCRTPAGTTGMVDVKIFVNTIAYPPLLFTYALEDTPFLRGIIPSRGPPGTEIEITGSNFGFEILEISVMINNIQCNVTMANDSVVQCIVGDHAGGTFPVMMHHKTKGSAMSTVVFEYPLNIQNINPSQGSFGGGQTMTVTGTGFNPQNSIILVCGSECAIDRLRSDYTTLLCEIPSNNGTGAEQACEVSVVNGKDLSQSMTPFTYAVSLTPLITAVSPKRGSTAGGTRLTVVGSGFSENMEDVHITIAEAKCDVEYSNKTHIICMTDAHTLSGWAPVCVHIRGVGMAKLDNADFLYVDAWSSNFSWGGKSPPEEGSLVVITKGQTILLDQSTPILKMLLIQGGTLIFDEADIELQAENILITDGGVLQIGTETSPFQHKAVITLHGHLRSPELPVYGAKTLAVREGILDLHGVPVPVTWTRLAHTAKAGERILILQEAVTWKPGDNIVIASTGHRHSQGENEKMTIASVSADGINITLSNPLNYTHLGITVTLPDGTLFEARAEVGILTRNILIRGSDNVEWNNKIPACPDGFDTGEFATQTCLQGKFGEEIGSDQFGGCVMFHAPVPGANMVTGRIEYVEVFHAGQAFRLGRYPIHWHLLGDLQFKSYVRGCAIHQAYNRAVTIHNTHHLLVERNIIYDIKGGAFFIEDGIEHGNILQYNLAVFVQQSTSLLNDDVTPAAFWVTNPNNTIRHNAVAGGTHFGFWYRMNNHPDGPSYDRNICQKRVPLGEFFNNTVHSQGWFGMWIFEEYFPMQTGSCTSTVPAPAIFNSLTTWNCQKGAEWVNGGALQFHNFVMVNNYEAGIETKRILAPYVGGWGETNGAVIKNAKIVGHLDELGMGSAFCTAKGLVLPFSEGLTVSSVHFMNFDRPNCVALGVTSISGVCNDRCGGWSAKFVDVQYSHTPNKAGFRWEHEMVMIDVDGSLTGHKGHTVIPHSSLLDPSHCTQEAEWSIGFPGSVCDASVSFHRLAFNQPSPVSLLEKDVVLSDSFGTSIIPFQKKRLTHMSGWMALIPNANHINWYFKGVDHITNISYTSTFYGFKEEDYVIISHNFTQNPDMFNIIDMRNGSSNPLNWNTSKNGDWHLEANTSTLYYLVSGRNDLHQSQLISGNLDPDVKDVVINFQAYCCILQDCFPVHPPSRKPIPKKRPATYNLWSNDSFWQSSRENNYTVPHPGANVIIPEGTWIVADIDMPSMERLIIWGVLELEDKYNVGAAESSYREVVLNATYISLQGGRLIGGWEDNPFKGDLKIVLRGNHTTQDWALPEGPNQGAKVLGVFGELDLHGIPHSIYKTKLSETAFAGSKVLSLMDAVDWQEGEEIVITTTSYDFHQTETRSIVKILHDHKILILNDSLSYTHFAEKYHVPGTGESYTLAADVGILSRNIKIVGEDYPGWSEDSFGARVLVGSFTENMMTFKGNARISNVEFYHSGQEGFRDSTDPRYAVTFLNLGQIQEHGSSYIRGCAFHHGFSPAIGVFGTDGLDIDDNIIHFTVGEGIRIWGNANRVRGNLIALSVWPGTYQNRKDLSSTLWHAAIEINRGTNTVLQNNVVAGFGRAGYRIDGEPCPGQFNPVEKWFDNEAHGGLYGIYMNQDGLPGCSLIQGFTIWTCWDYGIYFQTTESVHIYNVTLVDNGMAIFPMIYMPAAISHKISSKNVQIKSSLIVGSSPGFNCSDVLTNDDPNIELTAAHRSPRSPSGGRSGICWPTFASAHNMAPRKPHAGIMSYNAISGLLDISGSTFVGFKNVCSGETNVIFITNPLNEDLQHPIHVKNIKLVDTTEQSKIFIHRPDISKVNPSDCVDMVCDAKRKSFLRDIDGSFLGNAGSVIPQAEYEWDGNSQVGIGDYRIPKAMLTFLNGSRIPVTEKAPHKGIIRDSTCKYLPEWQSYQCFGMEYAMMVIESLDPDTETRRLSPVAIMGNGYVDLINGPQDHGWCAGYTCQRRLSLFHSIVALNKSYEVYFTGTSPQNLRLMLLNVDHNKAVLVGIFFSTLQRLDVYVNNLLVCPKTTIWNAQQKHCELNNHLYKDQFLPNLDSTVLGENYFDGTYQMLYLLVKGTIPVEIHTATVIFVSFQLSVATEDDFYTSHNLVKNLALFLKIPSDKIRISKIRGKSLRRKRSMGFIIEIEIGDPPIQFISNGTTGQMQLSELQEIAGSLGQAVILGNISSILGFNISSMSITNPLPSPSDSGWIKVTAQPVERSAFPVHHVAFVSSLLVITQPVAAQPGQPFPQQPSVKATDSDGNCVSVGITALTLRAILKDSNNNQVNGLSGNTTIPFSSCWANYTDLTPLRTGKNYKIEFILDNVVGVESRTFSLLAESVSSSGSSSSSNSKASTVGTYAQ

SEQ ID NO: 2885 - protein, 1397 aa, synthetic construct
  REGION 1..1397: note = PLA2R1 (Q13018) SP+PP+ECD
MLLSPSLLLLLLLGAPRGCAEGVAAALTPERLLEWQDKGIFVIQSESLKKCIQAGKSVLTLENCKQANKHMLWKWVSNHGLFNIGGSGCLGLNFSAPEQPLSLYECDSTLVSLRWRCNRKMITGPLQYSVQVAHDNTVVASRKYIHKWISYGSGGGDICEYLHKDLHTIKGNTHGMPCMFPFQYNHQWHHECTREGREDDLLWCATTSRYERDEKWGFCPDPTSAEVGCDTIWEKDLNSHICYQFNLLSSLSWSEAHSSCQMQGGTLLSITDETEENFIREHMSSKTVEVWMGLNQLDEHAGWQWSDGTPLNYLNWSPEVNFEPFVEDHCGTFSSFMPSAWRSRDCESTLPYICKKYLNHIDHEIVEKDAWKYYATHCEPGWNPYNRNCYKLQKEEKTWHEALRSCQADNSALIDITSLAEVEFLVTLLGDENASETWIGLSSNKIPVSFEWSNDSSVIFTNWHTLEPHIFPNRSQLCVSAEQSEGHWKVKNCEERLFYICKKAGHVLSDAESGCQEGWERHGGFCYKIDTVLRSFDQASSGYYCPPALVTITNRFEQAFITSLISSVVKMKDSYFWIALQDQNDTGEYTWKPVGQKPEPVQYTHWNTHQPRYSGGCVAMRGRHPLGRWEVKHCRHFKAMSLCKQPVENQEKAEYEERWPFHPCYLDWESEPGLASCFKVFHSEKVLMKRTWREAEAFCEEFGAHLASFAHIEEENFVNELLHSKFNWTEERQFWIGFNKRNPLNAGSWEWSDRTPVVSSFLDNTYFGEDARNCAVYKANKTLLPLHCGSKREWICKIPRDVKPKIPFWYQYDVPWLFYQDAEYLFHTFASEWLNFEFVCSWLHSDLLTIHSAHEQEFIHSKIKALSKYGASWWIGLQEERANDEFRWRDGTPVIYQNWDTGRERTVNNQSQRCGFISSITGLWGSEECSVSMPSICKRKKVWLIEKKKDTPKQHGTCPKGWLYFNYKCLLLNIPKDPSSWKNWTHAQHFCAEEGGTLVAIESEVEQAFITMNLFGQTTSVWIGLQNDDYETWLNGKPVVYSNWSPFDIINIPSHNTTEVQKHIPLCALLSSNPNFHFTGKWYFEDCGKEGYGFVCEKMQDTSGHGVNTSDMYPMPNTLEYGNRTYKIINANMTWYAAIKTCLMHKAQLVSITDQYHQSFLTVVLNRLGYAHWIGLFTTDNGLNFDWSDGTKSSFTFWKDEESSLLGDCVFADSNGRWHSTACESFLQGAICHVPPETRQSEHPELCSETSIPWIKFKSNCYSFSTVLDSMSFEAAHEFCKKEGSNLLTIKDEAENAFLLEELFAFGSSVQMVWLNAQFDGNNETIKWFDGTPTDQSNWGIRKPDTDYFKPHHCVALRIPEGLWQLSPCQEKKGFICKMEADIHTAEALPEKGPSHS

SEQ ID NO: 2886 - protein, 1417 aa, synthetic construct
  REGION 1..1417: note = PLB1 (Q6P1J6) SP+PP+ECD
MGLRPGIFLLELLLLLGQGTPQIHTSPRKSTLEGQLWPETLKNSPFPCNPNKLGVNMPSKSVHSLKPSDIKFVAAIGNLEIPPDPGTGDLEKQDWTERPQQVCMGVMTVLSDIIRYFSPSVPMPVCHTGKRVIPHDGAEDLWIQAQELVRNMKENLQLDFQFDWKLINVFFSNASQCYLCPSAQQNGLAAGGVDELMGVLDYLQQEVPRAFVNLVDLSEVAEVSRQYHGTWLSPAPEPCNCSEETTRLAKVVMQWSYQEAWNSLLASSRYSEQESFTVVFQPFFYETTPSLHSEDPRLQDSTTLAWHLWNRMMEPAGEKDEPLSVKHGRPMKCPSQESPYLFSYRNSNYLTRLQKPQDKLEVREGAEIRCPDKDPSDTVPTSVHRLKPADINVIGALGDSLTAGNGAGSTPGNVLDVLTQYRGLSWSVGGDENIGTVTTLANILREFNPSLKGFSVGTGKETSPNAFLNQAVAGGRAEDLPVQARRLVDLMKNDTRIHFQEDWKIITLFIGGNDLCDFCNDLVHYSPQNFTDNIGKALDILHAEVPRAFVNLVTVLEIVNLRELYQEKKVYCPRMILRSLCPCVLKFDDNSTELATLIEFNKKFQEKTHQLIESGRYDTREDFTVVVQPFFENVDMPKTSEGLPDNSFFAPDCFHFSSKSHSRAASALWNNMLEPVGQKTTRHKFENKINITCPNQVQPFLRTYKNSMQGHGTWLPCRDRAPSALHPTSVHALRPADIQVVAALGDSLTAGNGIGSKPDDLPDVTTQYRGLSYSAGGDGSLENVTTLPNILREFNRNLTGYAVGTGDANDTNAFLNQAVPGAKAEDLMSQVQTLMQKMKDDHRVNFHEDWKVITVLIGGSDLCDYCTDSNLYSAANFVHHLRNALDVLHREVPRVLVNLVDFLNPTIMRQVFLGNPDKCPVQQASVLCNCVLTLRENSQELARLEAFSRAYRSSMRELVGSGRYDTQEDFSVVLQPFFQNIQLPVLADGLPDTSFFAPDCIHPNQKFHSQLARALWTNMLEPLGSKTETLDLRAEMPITCPTQNEPFLRTPRNSNYTYPIKPAIENWGSDFLCTEWKASNSVPTSVHQLRPADIKVVAALGDSLTTAVGARPNNSSDLPTSWRGLSWSIGGDGNLETHTTLPNILKKFNPYLLGFSTSTWEGTAGLNVAAEGARARDMPAQAWDLVERMKNSPDINLEKDWKLVTLFIGVNDLCHYCENPEAHLATEYVQHIQQALDILSEELPRAFVNVVEVMELASLYQGQGGKCAMLAAQNNCTCLRHSQSSLEKQELKKVNWNLQHGISSFSYWHQYTQREDFAVVVQPFFQNTLTPLNERGDTDLTFFSEDCFHFSDRGHAEMAIALWNNMLEPVGRKTTSNNFTHSRAKLKCPSPESPYLYTLRNSRLLPDQAEEAPEVLY

SEQ ID NO: 2887 - protein, 426 aa, synthetic construct
  REGION 1..426: note = PLXDC1 (Q8IUK5) SP+PP+ECD
MRGELWLLVLVLREAARALSPQPGAGHDEGPGSGWAAKGTVRGWNRRARESPGHVSEPDRTQLSQDLGGGTLAMDTLPDNRTRVVEDNHSYYVSRLYGPSEPHSRELWVDVAEANRSQVKIHTILSNTHRQASRVVLSFDFPFYGHPLRQITIATGGFIFMGDVIHRMLTATQYVAPLMANFNPGYSDNSTVVYFDNGTVFVVQWDHVYLQGWEDKGSFTFQAALHHDGRIVFAYKEIPMSVPEISSSQHPVKTGLSDAFMILNPSPDVPESRRRSIFEYHRIELDPSKVTSMSAVEFTPLPTCLQHRSCDACMSSDLTFNCSWCHVLQRCSSGFDRYRQEWMDYGCAQEAEGRMCEDFQDEDHDSASPDTSFSPYDGDLTTTSSSLFIDSLTTEDDTKLNPYAGGDGLQNNLSPKTKGTPVHLGT

SEQ ID NO: 2888 - protein, 454 aa, synthetic construct
  REGION 1..454: note = PLXDC2 (Q6UX71) SP+PP+ECD
MARFPKADLAAAGVMLLCHFFTDQFQFADGKPGDQILDWQYGVTQAFPHTEEEVEVDSHAYSHRWKRNLDFLKAVDTNRASVGQDSPEPRSFTDLLLDDGQDNNTQIEEDTDHNYYISRIYGPSDSASRDLWVNIDQMEKDKVKIHGILSNTHRQAARVNLSFDFPFYGHFLREITVATGGFIYTGEVVHRMLTATQYIAPLMANFDPSVSRNSTVRYFDNGTALVVQWDHVHLQDNYNLGSFTFQATLLMDGRIIFGYKEIPVLVTQISSTNHPVKVGLSDAFVVVHRIQQIPNVRRRTIYEYHRVELQMSKITNISAVEMTPLPTCLQFNRCGPCVSSQIGFNCSWCSKLQRCSSGFDRHRQDWVDSGCPEESKEKMCENTEPVETSSRTTTTVGATTTQFRVLTTTRRAVTSQFPTSLPTEDDTKIALHLKDNGASTDDSAAEKKGGTLHA

SEQ ID NO: 2889 - protein, 1244 aa, synthetic construct
  REGION 1..1244: note = PLXNA1 (Q9UIW2) SP+PP+ECD
MPLPPRSLQVLLLLLLLLLLLPGMWAEAGLPRAGGGSQPPFRTFSASDWGLTHLVVHEQTGEVYVGAVNRIYKLSGNLTLLRAHVTGPVEDNEKCYPPPSVQSCPHGLGSTDNVNKLLLLDYAANRLLACGSASQGICQFLRLDDLFKLGEPHHRKEHYLSSVQEAGSMAGVLIAGPPGQGQAKLFVGTPIDGKSEYFPTLSSRRLMANEEDADMFGFVYQDEFVSSQLKIPSDTLSKFPAFDIYYVYSFRSEQFVYYLTLQLDTQLTSPDAAGEHFFTSKIVRLCVDDPKFYSYVEFPIGCEQAGVEYRLVQDAYLSRPGRALAHQLGLAEDEDVLFTVFAQGQKNRVKPPKESALCLFTLRAIKEKIKERIQSCYRGEGKLSLPWLLNKELGCINSPLQIDDDFCGQDFNQPLGGTVTIEGTPLFVDKDDGLTAVAAYDYRGRTVVFAGTRSGRIRKILVDLSNPGGRPALAYESVVAQEGSPILRDLVLSPNHQYLYAMTEKQVTRVPVESCVQYTSCELCLGSRDPHCGWCVLHSICSRRDACERADEPQRFAADLLQCVQLTVQPRNVSVTMSQVPLVLQAWNVPDLSAGVNCSFEDFTESESVLEDGRIHCRSPSAREVAPITRGQGDQRVVKLYLKSKETGKKFASVDFVFYNCSVHQSCLSCVNGSFPCHWCKYRHVCTHNVADCAFLEGRVNVSEDCPQILPSTQIYVPVGVVKPITLAARNLPQPQSGQRGYECLFHIPGSPARVTALRFNSSSLQCQNSSYSYEGNDVSDLPVNLSVVWNGNFVIDNPQNIQAHLYKCPALRESCGLCLKADPRFECGWCVAERRCSLRHHCAADTPASWMHARHGSSRCTDPKILKLSPETGPRQGGTRLTITGENLGLRFEDVRLGVRVGKVLCSPVESEYISAEQIVCEIGDASSVRAHDALVEVCVRDCSPHYRALSPKRFTFVTPTFYRVSPSRGPLSGGTWIGIEGSHLNAGSDVAVSVGGRPCSFSWRNSREIRCLTPPGQSPGSAPIIININRAQLTNPEVKYNYTEDPTILRIDPEWSINSGGTLLTVTGTNLATVREPRIRAKYGGIERENGCLVYNDTTMVCRAPSVANPVRSPPELGERPDELGFVMDNVRSLLVLNSTSFLYYPDPVLEPLSPTGLLELKPSSPLILKGRNLLPPAPGNSRLNYTVLIGSTPCTLTVSETQLLCEAPNLTGQHKVTVRAGGFEFSPGTLQVYSDSLLTLP

SEQ ID NO: 2890 - protein, 1237 aa, synthetic construct
  REGION 1..1237: note = PLXNA2 (O75051) SP+PP+ECD
MEQRRPWPRALEVDSRSVVLLSVVWVLLAPPAAGMPQFSTFHSENRDWTFNHLTVHQGTGAVYVGAINRVYKLTGNLTIQVAHKTGPEEDNKSCYPPLIVQPCSEVLTLTNNVNKLLIIDYSENRLLACGSLYQGVCKLLRLDDLFILVEPSHKKEHYLSSVNKTGTMYGVIVRSEGEDGKLFIGTAVDGKQDYFPTLSSRKLPRDPESSAMLDYELHSDFVSSLIKIPSDTLALVSHFDIFYIYGFASGGFVYFLTVQPETPEGVAINSAGDLFYTSRIVRLCKDDPKFHSYVSLPFGCTRAGVEYRLLQAAYLAKPGDSLAQAFNITSQDDVLFAIFSKGQKQYHHPPDDSALCAFPIRAINLQIKERLQSCYQGEGNLELNWLLGKDVQCTKAPVPIDDNFCGLDINQPLGGSTPVEGLTLYTTSRDRMTSVASYVYNGYSVVFVGTKSGKLKKIRADGPPHGGVQYEMVSVLKDGSPILRDMAFSIDQRYLYVMSERQVTRVPVESCEQYTTCGECLSSGDPHCGWCALHNMCSRRDKCQQAWEPNRFAASISQCVSLAVHPSSISVSEHSRLLSLVVSDAPDLSAGIACAFGNLTEVEGQVSGSQVICISPGPKDVPVIPLDQDWFGLELQLRSKETGKIFVSTEFKFYNCSAHQLCLSCVNSAFRCHWCKYRNLCTHDPTTCSFQEGRINISEDCPQLVPTEEILIPVGEVKPITLKARNLPQPQSGQRGYECVLNIQGAIHRVPALRFNSSSVQCQNSSYQYDGMDISNLAVDFAVVWNGNFIIDNPQDLKVHLYKCAAQRESCGLCLKADRKFECGWCSGERRCTLHQHCTSPSSPWLDWSSHNVKCSNPQITEILTVSGPPEGGTRVTIHGVNLGLDFSEIAHHVQVAGVPCTPLPGEYIIAEQIVCEMGHALVGTTSGPVRLCIGECKPEFMTKSHQQYTFVNPSVLSLNPIRGPESGGTMVTITGHYLGAGSSVAVYLGNQTCEFYGRSMSEIVCVSPPSSNGLGPVPVSVSVDRAHVDSNLQFEYIDDPRVQRIEPEWSIASGHTPLTITGFNLDVIQEPRIRVKFNGKESVNVCKVVNTTTLTCLAPSLTTDYRPGLDTVERPDEFGFVFNNVQSLLIYNDTKFIYYPNPTFELLSPTGVLDQKPGSPIILKGKNLCPPASGGAKLNYTVLIGETPCAVTVSETQLLCEPPNLTGQHKVMVHVGGMVFSPGSVSVISDSLLTLP

SEQ ID NO: 2891 - protein, 1220 aa, synthetic construct
  REGION 1..1220: note = PLXNA3 (P51805) SP+PP+ECD
MPSVCLLLLLFLAVGGALGNRPFRAFVVTDTTLTHLAVHRVTGEVFVGAVNRVFKLAPNLTELRAHVTGPVEDNARCYPPPSMRVCAHRLAPVDNINKLLLIDYAARRLVACGSIWQGICQFLRLDDLFKLGEPHHRKEHYLSGAQEPDSMAGVIVEQGQGPSKLFVGTAVDGKSEYFPTLSSRKLISDEDSADMFSLVYQDEFVSSQIKIPSDTLSLYPAFDIYYIYGFVSASFVYFLTLQLDTQQTLLDTAGEKFFTSKIVRMCAGDSEFYSYVEFPIGCSWRGVEYRLVQSAHLAKPGLLLAQALGVPADEDVLFTIFSQGQKNRASPPRQTILCLFTLSNINAHIRRRIQSCYRGEGTLALPWLLNKELPCINTPMQINGNFCGLVLNQPLGGLHVIEGLPLLADSTDGMASVAAYTYRQHSVVFIGTRSGSLKKVRVDGFQDAHLYETVPVVDGSPILRDLLFSPDHRHIYLLSEKQVSQLPVETCEQYQSCAACLGSGDPHCGWCVLRHRCCREGACLGASAPHGFAEELSKCVQVRVRPNNVSVTSPGVQLTVTLHNVPDLSAGVSCAFEAAAENEAVLLPSGELLCPSPSLQELRALTRGHGATRTVRLQLLSKETGVRFAGADFVFYNCSVLQSCMSCVGSPYPCHWCKYRHTCTSRPHECSFQEGRVHSPEGCPEILPSGDLLIPVGVMQPLTLRAKNLPQPQSGQKNYECVVRVQGRQQRVPAVRFNSSSVQCQNASYSYEGDEHGDTELDFSVVWDGDFPIDKPPSFRALLYKCWAQRPSCGLCLKADPRFNCGWCISEHRCQLRTHCPAPKTNWMHLSQKGTRCSHPRITQIHPLVGPKEGGTRVTIVGDNLGLLSREVGLRVAGVRCNSIPAEYISAERIVCEMEESLVPSPPPGPVELCVGDCSADFRTQSEQVYSFVTPTFDQVSPSRGPASGGTRLTISGSSLDAGSRVTVTVRDSECQFVRRDAKAIVCISPLSTLGPSQAPITLAIDRANISSPGLIYTYTQDPTVTRLEPTWSIINGSTAITVSGTHLLTVQEPRVRAKYRGIETTNTCQVINDTAMLCKAPGIFLGRPQPRAQGEHPDEFGFLLDHVQTARSLNRSSFTYYPDPSFEPLGPSGVLDVKPGSHVVLKGKNLIPAAAGSSRLNYTVLIGGQPCSLTVSDTQLLCDSPSQTGRQPVMVLVGGLEFWLGTLHISAERALTLPA

SEQ ID NO: 2892 - protein, 1237 aa, synthetic construct
  REGION 1..1237: note = PLXNA4 (Q9HCM2) SP+PP+ECD
MKAMPWNWTCLLSHLLMVGMGSSTLLTRQPAPLSQKQRSFVTFRGEPAEGFNHLVVDERTGHIYLGAVNRIYKLSSDLKVLVTHETGPDEDNPKCYPPRIVQTCNEPLTTTNNVNKMLLIDYKENRLIACGSLYQGICKLLRLEDLFKLGEPYHKKEHYLSGVNESGSVFGVIVSYSNLDDKLFIATAVDGKPEYFPTISSRKLTKNSEADGMFAYVFHDEFVASMIKIPSDTFTIIPDFDIYYVYGFSSGNFVYFLTLQPEMVSPPGSTTKEQVYTSKLVRLCKEDTAFNSYVEVPIGCERSGVEYRLLQAAYLSKAGAVLGRTLGVHPDDDLLFTVFSKGQKRKMKSLDESALCIFILKQINDRIKERLQSCYRGEGTLDLAWLKVKDIPCSSALLTIDDNFCGLDMNAPLGVSDMVRGIPVFTEDRDRMTSVIAYVYKNHSLAFVGTKSGKLKKIRVDGPRGNALQYETVQVVDPGPVLRDMAFSKDHEQLYIMSERQLTRVPVESCGQYQSCGECLGSGDPHCGWCVLHNTCTRKERCERSKEPRRFASEMKQCVRLTVHPNNISVSQYNVLLVLETYNVPELSAGVNCTFEDLSEMDGLVVGNQIQCYSPAAKEVPRIITENGDHHVVQLQLKSKETGMTFASTSFVFYNCSVHNSCLSCVESPYRCHWCKYRHVCTHDPKTCSFQEGRVKLPEDCPQLLRVDKILVPVEVIKPITLKAKNLPQPQSGQRGYECILNIQGSEQRVPALRFNSSSVQCQNTSYSYEGMEINNLPVELTVVWNGHFNIDNPAQNKVHLYKCGAMRESCGLCLKADPDFACGWCQGPGQCTLRQHCPAQESQWLELSGAKSKCTNPRITEIIPVTGPREGGTKVTIRGENLGLEFRDIASHVKVAGVECSPLVDGYIPAEQIVCEMGEAKPSQHAGFVEICVAVCRPEFMARSSQLYYFMTLTLSDLKPSRGPMSGGTQVTITGTNLNAGSNVVVMFGKQPCLFHRRSPSYIVCNTTSSDEVLEMKVSVQVDRAKIHQDLVFQYVEDPTIVRIEPEWSIVSGNTPIAVWGTHLDLIQNPQIRAKHGGKEHINICEVLNATEMTCQAPALALGPDHQSDLTERPEEFGFILDNVQSLLILNKTNFTYYPNPVFEAFGPSGILELKPGTPIILKGKNLIPPVAGGNVKLNYTVLVGEKPCTVTVSDVQLLCESPNLIGRHKVMARVGGMEYSPGMVYIAPDSPLSLP

SEQ ID NO: 2893 - protein, 1490 aa, synthetic construct
  REGION 1..1490: note = PLXNB1 (O43157) SP+PP+ECD
MPALGPALLQALWAGWVLTLQPLPPTAFTPNGTYLQHLARDPTSGTLYLGATNFLFQLSPGLQLEATVSTGPVLDSRDCLPPVMPDECPQAQPTNNPNQLLLVSPGALVVCGSVHQGVCEQRRLGQLEQLLLRPERPGDTQYVAANDPAVSTVGLVAQGLAGEPLLFVGRGYTSRGVGGGIPPITTRALWPPDPQAAFSYEETAKLAVGRLSEYSHHFVSAFARGASAYFLFLRRDLQAQSRAFRAYVSRVCLRDQHYYSYVELPLACEGGRYGLIQAAAVATSREVAHGEVLFAAFSSAAPPTVGRPPSAAAGASGASALCAFPLDEVDRLANRTRDACYTREGRAEDGTEVAYIEYDVNSDCAQLPVDTLDAYPCGSDHTPSPMASRVPLEATPILEWPGIQLTAVAVTMEDGHTIAFLGDSQGQLHRVYLGPGSDGHPYSTQSIQQGSAVSRDLTFDGTFEHLYVMTQSTLLKVPVASCAQHLDCASCLAHRDPYCGWCVLLGRCSRRSECSRGQGPEQWLWSFQPELGCLQVAAMSPANISREETREVFLSVPDLPPLWPGESYSCHFGEHQSPALLTGSGVMCPSPDPSEAPVLPRGADYVSVSVELRFGAVVIAKTSLSFYDCVAVTELRPSAQCQACVSSRWGCNWCVWQHLCTHKASCDAGPMVASHQSPLVSPDPPARGGPSPSPPTAPKALATPAPDTLPVEPGAPSTATASDISPGASPSLLSPWGPWAGSGSISSPGSTGSPLHEEPSPPSPQNGPGTAVPAPTDFRPSATPEDLLASPLSPSEVAAVPPADPGPEALHPTVPLDLPPATVPATTFPGAMGSVKPALDWLTREGGELPEADEWTGGDAPAFSTSTLLSGDGDSAELEGPPAPLILPSSLDYQYDTPGLWELEEATLGASSCPCVESVQGSTLMPVHVEREIRLLGRNLHLFQDGPGDNECVMELEGLEVVVEARVECEPPPDTQCHVTCQQHQLSYEALQPELRVGLFLRRAGRLRVDSAEGLHVVLYDCSVGHGDCSRCQTAMPQYGCVWCEGERPRCVTREACGEAEAVATQCPAPLIHSVEPLTGPVDGGTRVTIRGSNLGQHVQDVLGMVTVAGVPCAVDAQEYEVSSSLVCITGASGEEVAGATAVEVPGRGRGVSEHDFAYQDPKVHSIFPARGPRAGGTRLTLNGSKLLTGRLEDIRVVVGDQPCHLLPEQQSEQLRCETSPRPTPATLPVAVWFGATERRLQRGQFKYTLDPNITSAGPTKSFLSGGREICVRGQNLDVVQTPRIRVTVVSRMLQPSQGLGRRRRVVPETACSLGPSCSSQQFEEPCHVNSSQLITCRTPALPGLPEDPWVRVEFILDNLVFDFATLNPTPFSYEADPTLQPLNPEDPTMPFRHKPGSVFSVEGENLDLAMSKEEVVAMIGDGPCVVKTLTRHHLYCEPPVEQPLPRHHALREAPDSLPEFTVQMGNLRFSLGHVQYDGESPGAFPVAAQ

SEQ ID NO: 2894 - protein, 1197 aa, synthetic construct
  REGION 1..1197: note = PLXNB2 (O15031) SP+PP+ECD
MALQLWALTLLGLLGAGASLRPRKLDFFRSEKELNHLAVDEASGVVYLGAVNALYQLDAKLQLEQQVATGPALDNKKCTPPIEASQCHEAEMTDNVNQLLLLDPPRKRLVECGSLFKGICALRALSNISLRLFYEDGSGEKSFVASNDEGVATVGLVSSTGPGGDRVLFVGKGNGPHDNGIIVSTRLLDRTDSREAFEAYTDHATYKAGYLSTNTQQFVAAFEDGPYVFFVFNQQDKHPARNRTLLARMCREDPNYYSYLEMDLQCRDPDIHAAAFGTCLAASVAAPGSGRVLYAVFSRDSRSSGGPGAGLCLFPLDKVHAKMEANRNACYTGTREARDIFYKPFHGDIQCGGHAPGSSKSFPCGSEHLPYPLGSRDGLRGTAVLQRGGLNLTAVTVAAENNHTVAFLGTSDGRILKVYLTPDGTSSEYDSILVEINKRVKRDLVLSGDLGSLYAMTQDKVFRLPVQECLSYPTCTQCRDSQDPYCGWCVVEGRCTRKAECPRAEEASHWLWSRSKSCVAVTSAQPQNMSRRAQGEVQLTVSPLPALSEEDELLCLFGESPPHPARVEGEAVICNSPSSIPVTPPGQDHVAVTIQLLLRRGNIFLTSYQYPFYDCRQAMSLEENLPCISCVSNRWTCQWDLRYHECREASPNPEDGIVRAHMEDSCPQFLGPSPLVIPMNHETDVNFQGKNLDTVKGSSLHVGSDLLKFMEPVTMQESGTFAFRTPKLSHDANETLPLHLYVKSYGKNIDSKLHVTLYNCSFGRSDCSLCRAANPDYRCAWCGGQSRCVYEALCNTTSECPPPVITRIQPETGPLGGGIRITILGSNLGVQAGDIQRISVAGRNCSFQPERYSVSTRIVCVIEAAETPFTGGVEVDVFGKLGRSPPNVQFTFQQPKPLSVEPQQGPQAGGTTLTIHGTHLDTGSQEDVRVTLNGVPCKVTKFGAQLQCVTGPQATRGQMLLEVSYGGSPVPNPGIFFTYRENPVLRAFEPLRSFASGGRSINVTGQGFSLIQRFAMVVIAEPLQSWQPPREAESLQPMTVVGTDYVFHNDTKVVFLSPAVPEEPEAYNLTVLIEMDGHRALLRTEAGAFEYVPDPTFENFTGGVKKQVNKLIHARGTNLNKAMTLQEAEAFVGAERCTMKTLTETDLYCEPPEVQPPPKRRQKRDTTHNLPEFIVKFGSREWVLGRVEYDTRVSDVP

SEQ ID NO: 2895 - protein, 1255 aa, synthetic construct
  REGION 1..1255: note = PLXNB3 (Q9ULL4) SP+PP+ECD
MCHAAQETPLLHHFMAPVMARWPPFGLCLLLLLLSPPPLPLTGAHRFSAPNTTLNHLALAPGRGTLYVGAVNRLFQLSPELQLEAVAVTGPVIDSPDCVPFRDPAECPQAQLTDNANQLLLVSSRAQELVACGQVRQGVCETRRLGDVAEVLYQAEDPGDGQFVAANTPGVATVGLVVPLPGRDLLLVARGLAGKLSAGVPPLAIRQLAGSQPFSSEGLGRLVVGDFSDYNNSYVGAFADARSAYFVFRRRGARAQAEYRSYVARVCLGDTNLYSYVEVPLACQGQGLIQAAFLAPGTLLGVFAAGPRGTQAALCAFPMVELGASMEQARRLCYTAGGRGPSGAEEATVEYGVTSRCVTLPLDSPESYPCGDEHTPSPIAGRQPLEVQPLLKLGQPVSAVAALQADGHMIAFLGDTQGQLYKVFLHGSQGQVYHSQQVGPPGSAISPDLLLDSSGSHLYVLTAHQVDRIPVAACPQFPDCASCLQAQDPLCGWCVLQGRCTRKGQCGRAGQLNQWLWSYEEDSHCLHIQSLLPGHHPRQEQGQVTLSVPRLPILDADEYFHCAFGDYDSLAHVEGPHVACVTPPQDQVPLNPPGTDHVTVPLALMFEDVTVAATNFSFYDCSAVQALEAAAPCRACVGSIWRCHWCPQSSHCVYGEHCPEGERTIYSAQEVDIQVRGPGACPQVEGLAGPHLVPVGWESHLALRVRNLQHFRGLPASFHCWLELPGELRGLPATLEETAGDSGLIHCQAHQFYPSMSQRELPVPIYVTQGEAQRLDNTHALYVILYDCAMGHPDCSHCQAANRSLGCLWCADGQPACRYGPLCPPGAVELLCPAPSIDAVEPLTGPPEGGLALTILGSNLGRAFADVQYAVSVASRPCNPEPSLYRTSARIVCVTSPAPNGTTGPVRVAIKSQPPGISSQHFTYQDPVLLSLSPRWGPQAGGTQLTIRGQHLQTGGNTSAFVGGQPCPILEPVCPEAIVCRTRPQAAPGEAAVLVVFGHAQRTLLASPFRYTANPQLVAAEPSASFRGGGRLIRVRGTGLDVVQRPLLSVWLEADAEVQASRAQPQDPQPRRSCGAPAADPQACIQLGGGLLQCSTVCSVNSSSLLLCRSPAVPDRAHPQRVFFTLDNVQVDFASASGGQGFLYQPNPRLAPLSREGPARPYRLKPGHVLDVEGEGLNLGISKEEVRVHIGRGECLVKTLTRTHLYCEPPAHAPQPANGSGLPQFVVQMGNVQLALGPVQYEAEPPLSAFPVEAQ

SEQ ID NO: 2896 - protein, 944 aa, synthetic construct
  REGION 1..944: note = PLXNC1 (O60486) SP+PP+ECD
MEVSRRKAPPRPPRPAAPLPLLAYLLALAAPGRGADEPVWRSEQAIGAIAASQEDGVFVASGSCLDQLDYSLEHSLSRLYRDQAGNCTEPVSLAPPARPRPGSSFSKLLLPYREGAAGLGGLLLTGWTFDRGACEVRPLGNLSRNSLRNGTEVVSCHPQGSTAGVVYRAGRNNRWYLAVAATYVLPEPETASRCNPAASDHDTAIALKDTEGRSLATQELGRLKLCEGAGSLHFVDAFLWNGSIYFPYYPYNYTSGAATGWPSMARIAQSTEVLFQGQASLDCGHGHPDGRRLLLSSSLVEALDVWAGVFSAAAGEGQERRSPTTTALCLFRMSEIQARAKRVSWDFKTAESHCKEGDQPERVQPIASSTLIHSDLTSVYGTVVMNRTVLFLGTGDGQLLKVILGENLTSNCPEVIYEIKEETPVFYKLVPDPVKNIYIYLTAGKEVRRIRVANCNKHKSCSECLTATDPHCGWCHSLQRCTFQGDCVHSENLENWLDISSGAKKCPKIQIIRSSKEKTTVTMVGSFSPRHSKCMVKNVDSSRELCQNKSQPNRTCTCSIPTRATYKDVSVVNVMFSFGSWNLSDRFNFTNCSSLKECPACVETGCAWCKSARRCIHPFTACDPSDYERNQEQCPVAVEKTSGGGRPKENKGNRTNQALQVFYIKSIEPQKVSTLGKSNVIVTGANFTRASNITMILKGTSTCDKDVIQVSHVLNDTHMKFSLPSSRKEMKDVCIQFDGGNCSSVGSLSYIALPHCSLIFPATTWISGGQNITMMGRNFDVIDNLIISHELKGNINVSEYCVATYCGFLAPSLKSSKVRTNVTVKLRVQDTYLDCGTLQYREDPRFTGYRVESEVDTELEVKIQKENDNFNISKKDIEITLFHGENGQLNCSFENITRNQDLTTILCKIKGIKTASTIANSSKKVRVKLGNLELYVEQESVPST

SEQ ID NO: 2897 - protein, 1271 aa, synthetic construct
  REGION 1..1271: note = PLXND1 (Q9Y4D7) SP+PP+ECD
MAPRAAGGAPLSARAAAASPPPFQTPPRCPVPLLLLLLLGAARAGALEIQRRFPSPTPTNNFALDGAAGTVYLAAVNRLYQLSGANLSLEAEAAVGPVPDSPLCHAPQLPQASCEHPRRLTDNYNKILQLDPGQGLVVVCGSIYQGFCQLRRRGNISAVAVRFPPAAPPAEPVTVFPSMLNVAANHPNASTVGLVLPPAAGAGGSRLLVGATYTGYGSSFFPRNRSLEDHRFENTPEIAIRSLDTRGDLAKLFTFDLNPSDDNILKIKQGAKEQHKLGFVSAFLHPSDPPPGAQSYAYLALNSEARAGDKESQARSLLARICLPHGAGGDAKKLTESYIQLGLQCAGGAGRGDLYSRLVSVFPARERLFAVFERPQGSPAARAAPAALCAFRFADVRAAIRAARTACFVEPAPDVVAVLDSVVQGTGPACERKLNIQLQPEQLDCGAAHLQHPLSILQPLKATPVFRAPGLTSVAVASVNNYTAVFLGTVNGRLLKINLNESMQVVSRRVVTVAYGEPVHHVMQFDPADSGYLYLMTSHQMARVKVAACNVHSTCGDCVGAADAYCGWCALETRCTLQQDCTNSSQQHFWTSASEGPSRCPAMTVLPSEIDVRQEYPGMILQISGSLPSLSGMEMACDYGNNIRTVARVPGPAFGHQIAYCNLLPRDQFPPFPPNQDHVTVEMSVRVNGRNIVKANFTIYDCSRTAQVYPHTACTSCLSAQWPCFWCSQQHSCVSNQSRCEASPNPTSPQDCPRTLLSPLAPVPTGGSQNILVPLANTAFFQGAALECSFGLEEIFEAVWVNESVVRCDQVVLHTTRKSQVFPLSLQLKGRPARFLDSPEPMTVMVYNCAMGSPDCSQCLGREDLGHLCMWSDGCRLRGPLQPMAGTCPAPEIHAIEPLSGPLDGGTLLTIRGRNLGRRLSDVAHGVWIGGVACEPLPDRYTVSEEIVCVTGPAPGPLSGVVTVNASKEGKSRDRFSYVLPLVHSLEPTMGPKAGGTRITIHGNDLHVGSELQVLVNDTDPCTELMRTDTSIACTMPEGALPAPVPVCVRFERRGCVHGNLTFWYMQNPVITAISPRRSPVSGGRTITVAGERFHMVQNVSMAVHHIGREPTLCKVLNSTLITCPSPGALSNASAPVDFFINGRAYADEVAVAEELLDPEEAQRGSRFRLDYLPNPQFSTAKREKWIKHHPGEPLTLVIHKEQDSLGLQSHEYRVKIGQVSCDIQIVSDRIIHCSVNESLGAAVGQLPITIQVGNFNQTIATLQLGGSETA

SEQ ID NO: 2898 - protein, 467 aa, synthetic construct
  REGION 1..467: note = PMEL (P40967) SP+PP+ECD
MDLVLKRCLLHLAVIGALLAVGATKVPRNQDWLGVSRQLRTKAWNRQLYPEWTEAQRLDCWRGGQVSLKVSNDGPTLIGANASFSIALNFPGSQKVLPDGQVIWVNNTIINGSQVWGGQPVYPQETDDACIFPDGGPCPSGSWSQKRSFVYVWKTWGQYWQVLGGPVSGLSIGTGRAMLGTHTMEVTVYHRRGSRSYVPLAHSSSAFTITDQVPFSVSVSQLRALDGGNKHFLRNQPLTFALQLHDPSGYLAEADLSYTWDFGDSSGTLISRALVVTHTYLEPGPVTAQVVLQAAIPLTSCGSSPVPGTTDGHRPTAEAPNTTAGQVPTTEVVGTTPGQAPTAEPSGTTSVQVPTTEVISTAPVQMPTAESTGMTPEKVPVSEVMGTTLAEMSTPEATGMTPAEVSIVVLSGTTAAQVTTTEWVETTARELPIPEPEGPDASSIMSTESITGSLGPLLDGTATLRLV

SEQ ID NO: 2899 - protein, 461 aa, synthetic construct
  REGION 1..461: note = PODXL (O00592) SP+PP+ECD
MRCALALSALLLLLSTPPLLPSSPSPSPSPSQNATQTTTDSSNKTAPTPASSVTIMATDTAQQSTVPTSKANEILASVKATTLGVSSDSPGTTTLAQQVSGPVNTTVARGGGSGNPTTTIESPKSTKSADTTTVATSTATAKPNTTSSQNGAEDTTNSGGKSSHSVTTDLTSTKAEHLTTPHPTSPLSPRQPTSTHPVATPTSSGHDHLMKISSSSSTVAIPGYTFTSPGMTTTLLETVFHHVSQAGLELLTSGDLPTLASQSAGITASSVISQRTQQTSSQMPASSTAPSSQETVQPTSPATALRTPTLPETMSSSPTAASTTHRYPKTPSPTVAHESNWAKCEDLETQTQSEKQLVLNLTGNTLCAGGASDEKLISLICRAVKATFNPAQDKCGIRLASVPGSQTVVVKEITIHTKLPAKDVYERLKDKWDELKEAGVSDMKLGDQGPPEEAEDRFSMP

SEQ ID NO: 2900 - protein, 500 aa, synthetic construct
  REGION 1..500: note = PODXL2 (Q9NZ53) SP+PP+ECD
MGRLLRAARLPPLLSPLLLLLVGGAFLGACVAGSDEPGPEGLTSTSLLDLLLPTGLEPLDSEEPSETMGLGAGLGAPGSGFPSEENEESRILQPPQYFWEEEEELNDSSLDLGPTADYVFPDLTEKAGSIEDTSQAQELPNLPSPLPKMNLVEPPWHMPPREEEEEEEEEEEREKEEVEKQEEEEEEELLPVNGSQEEAKPQVRDFSLTSSSQTPGATKSRHEDSGDQASSGVEVESSMGPSLLLPSVTPTTVTPGDQDSTSQEAEATVLPAAGLGVEFEAPQEASEEATAGAAGLSGQHEEVPALPSFPQTTAPSGAEHPDEDPLGSRTSASSPLAPGDMELTPSSATLGQEDLNQQLLEGQAAEAQSRIPWDSTQVICKDWSNLAGKNYIILNMTENIDCEVFRQHRGPQLLALVEEVLPRHGSGHHGAWHISLSKPSEKEQHLLMTLVGEQGVVPTQDVLSMLGDIRRSLEEIGIQNYSTTSSCQARASQVRSDYGT

SEQ ID NO: 2901 - protein, 92 aa, synthetic construct
  REGION 1..92: note = PRIMA1 (Q86XR5) SP+PP+ECD
MLLRDLVLRRGCCWSSLLLHCALHPLWGFVQVTHGEPQKSCSKVTDSCRHVCQCRPPPPLPPPPPPPPPPRLLSAPAPNSTSCPTEESWWSG

SEQ ID NO: 2902 - protein, 234 aa, synthetic construct
  REGION 1..234: note = PRLR (P16471) SP+PP+ECD
MKENVASATVFTLLLFLNTCLLNGQLPPGKPEIFKCRSPNKETFTCWWRPGTDGGLPTNYSLTYHREGETLMHECPDYITGGPNSCHFGKQYTSMWRTYIMMVNATNQMGSSFSDELYVDVTYIVQPDPPLELAVEVKQPEDRKPYLWIKWSPPTLIDLKTGWFTLLYEIRLKPEKAAEWEIHFAGQQTEFKILSLHPGQKYLVQVRCKPDHGYWSAWSPATFIQIPSDFTMND

SEQ ID NO: 2903 - protein, 210 aa, synthetic construct
  REGION 1..210: note = PROCR (Q9UNN8) SP+PP+ECD
MLTTLLPILLLSGWAFCSQDASDGLQRLHMLQISYFRDPYHVWYQGNASLGGHLTHVLEGPDTNTTIIQLQPLQEPESWARTQSGLQSYLLQFHGLVRLVHQERTLAFPLTIRCFLGCELPPEGSRAHVFFEVAVNGSSFVSFRPERALWQADTQVTSGVVTFTLQQLNAYNRTRYELREFLEDTCVQYVQKHISAENTKGSQTSRSYTS

SEQ ID NO: 2904 - protein, 319 aa, synthetic construct
  REGION 1..319: note = PRSS8 (Q16651) SP+PP+ECD
MAQKGVLGPGQLGAVAILLYLGLLRSGTGAEGAEAPCGVAPQARITGGSSAVAGQWPWQVSITYEGVHVCGGSLVSEQWVLSAAHCFPSEHHKEAYEVKLGAHQLDSYSEDAKVSTLKDIIPHPSYLQEGSQGDIALLQLSRPITFSRYIRPICLPAANASFPNGLHCTVTGWGHVAPSVSLLTPKPLQQLEVPLISRETCNCLYNIDAKPEEPHFVQEDMVCAGYVEGGKDACQGDSGGPLSCPVEGLWYLTGIVSWGDACGARNRPGVYTLASSYASWIQSKVTELQPRVVPQTQESQPDSNLCGSHLAFSSAPAQG

SEQ ID NO: 2905 - protein, 949 aa, synthetic construct
  REGION 1..949: note = PRTG (Q2VWP7) SP+PP+ECD
MAPPLRPLARLRPPGMLLRALLLLLLLSPLPGVWCFSELSFVKEPQDVTVTRKDPVVLDCQAHGEVPIKVTWLKNGAKMSENKRIEVLSNGSLYISEVEGRRGEQSDEGFYQCLAMNKYGAILSQKAHLALSTISAFEVQPISTEVHEGGVARFACKISSHPPAVITWEFNRTTLPMTMDRITALPTGVLQIYDVSQRDSGNYRCIAATVAHRRKSMEASLTVIPAKESKSFHTPTIIAGPQNITTSLHQTVVLECMATGNPKPIISWSRLDHKSIDVFNTRVLGNGNLMISDVRLQHAGVYVCRATTPGTRNFTVAMATLTVLAPPSFVEWPESLTRPRAGTARFVCQAEGIPSPKMSWLKNGRKIHSNGRIKMYNSKLVINQIIPEDDAIYQCMAENSQGSILSRARLTVVMSEDRPSAPYNVHAETMSSSAILLAWERPLYNSDKVIAYSVHYMKAEGLNNEEYQVVIGNDTTHYIIDDLEPASNYTFYIVAYMPMGASQMSDHVTQNTLEDVPLRPPEISLTSRSPTDILISWLPIPAKYRRGQVVLYRLSFRLSTENSIQVLELPGTTHEYLLEGLKPDSVYLVRITAATRVGLGESSVWTSHRTPKATSVKAPKSPELHLEPLNCTTISVRWQQDVEDTAAIQGYKLYYKEEGQQENGPIFLDTKDLLYTLSGLDPRRKYHVRLLAYNNIDDGYQADQTVSTPGCVSVRDRMVPPPPPPHHLYAKANTSSSIFLHWRRPAFTAAQIINYTIRCNPVGLQNASLVLYLQTSETHMLVQGLEPNTKYEFAVRLHVDQLSSPWSPVVYHSTLPEAPAGPPVGVKVTLIEDDTALVSWKPPDGPETVVTRYTILYASRKAWIAGEWQVLHREGAITMALLENLVAGNVYIVKISASNEVGEGPFSNSVELAVLPKETSESNQRPKRLDSADAKVYSGYYHLDQKSMT

SEQ ID NO: 2906 - protein, 146 aa, synthetic construct
  REGION 1..146: note = PTCRA (Q6ISU1) SP+PP+ECD
MAGTWLLLLLALGCPALPTGVGGTPFPSLAPPIMLLVDGKQQMVVVCLVLDVAPPGLDSPIWFSAGNGSALDAFTYGPSPATDGTWTNLAHLSLPSEELASWEPLVCHTGPGAEGHSRSTQPMHLSGEASTARTCPQEPLRGTPGG

SEQ ID NO: 2907 - protein, 832 aa, synthetic construct
  REGION 1..832: note = PTGFRN (Q9P2B2) SP+PP+ECD
MGRLASRPLLLALLSLALCRGRVVRVPTATLVRVVGTELVIPCNVSDYDGPSEQNFDWSFSSLGSSFVELASTWEVGFPAQLYQERLQRGEILLRRTANDAVELHIKNVQPSDQGHYKCSTPSTDATVQGNYEDTVQVKVLADSLHVGPSARPPPSLSLREGEPFELRCTAASASPLHTHLALLWEVHRGPARRSVLALTHEGRFHPGLGYEQRYHSGDVRLDTVGSDAYRLSVSRALSADQGSYRCIVSEWIAEQGNWQEIQEKAVEVATVVIQPSVLRAAVPKNVSVAEGKELDLTCNITTDRADDVRPEVTWSFSRMPDSTLPGSRVLARLDRDSLVHSSPHVALSHVDARSYHLLVRDVSKENSGYYYCHVSLWAPGHNRSWHKVAEAVSSPAGVGVTWLEPDYQVYLNASKVPGFADDPTELACRVVDTKSGEANVRFTVSWYYRMNRRSDNVVTSELLAVMDGDWTLKYGERSKQRAQDGDFIFSKEHTDTFNFRIQRTTEEDRGNYYCVVSAWTKQRNNSWVKSKDVFSKPVNIFWALEDSVLVVKARQPKPFFAAGNTFEMTCKVSSKNIKSPRYSVLIMAEKPVGDLSSPNETKYIISLDQDSVVKLENWTDASRVDGVVLEKVQEDEFRYRMYQTQVSDAGLYRCMVTAWSPVRGSLWREAATSLSNPIEIDFQTSGPIFNASVHSDTPSVIRGDLIKLFCIITVEGAALDPDDMAFDVSWFAVHSFGLDKAPVLLSSLDRKGIVTTSRRDWKSDLSLERVSVLEFLLQVHGSEDQDFGNYYCSVTPWVKSPTGSWQKEAEIHSKPVFITVKMDVLNAFKYP

SEQ ID NO: 2908 - protein, 704 aa, synthetic construct
  REGION 1..704: note = PTK7 (Q13308) SP+PP+ECD
MGAARGSPARPRRLPLLSVLLLPLLGGTQTAIVFIKQPSSQDALQGRRALLRCEVEAPGPVHVYWLLDGAPVQDTERRFAQGSSLSFAAVDRLQDSGTFQCVARDDVTGEEARSANASFNIKWIEAGPVVLKHPASEAEIQPQTQVTLRCHIDGHPRPTYQWFRDGTPLSDGQSNHTVSSKERNLTLRPAGPEHSGLYSCCAHSAFGQACSSQNFTLSIADESFARVVLAPQDVVVARYEEAMFHCQFSAQPPPSLQWLFEDETPITNRSRPPHLRRATVFANGSLLLTQVRPRNAGIYRCIGQGQRGPPIILEATLHLAEIEDMPLFEPRVFTAGSEERVTCLPPKGLPEPSVWWEHAGVRLPTHGRVYQKGHELVLANIAESDAGVYTCHAANLAGQRRQDVNITVATVPSWLKKPQDSQLEEGKPGYLDCLTQATPKPTVVWYRNQMLISEDSRFEVFKNGTLRINSVEVYDGTWYRCMSSTPAGSIEAQARVQVLEKLKFTPPPQPQQCMEFDKEATVPCSATGREKPTIKWERADGSSLPEWVTDNAGTLHFARVTRDDAGNYTCIASNGPQGQIRAHVQLTVAVFITFKVEPERTTVYQGHTALLQCEAQGDPKPLIQWKGKDRILDPTKLGPRMHIFQNGSLVIHDVAPEDSGRYTCIAGNSCNIKHTEAPLYVVDKPVPEESEGPGSPPPYKMIQT

SEQ ID NO: 2909 - protein, 151 aa, synthetic construct
  REGION 1..151: note = PTPRA (P18433) SP+PP+ECD
MDSWFILVLLGSGLICVSANNATTVAPSVGITRLINSSTAEPVKEEAKTSNPTSSLTSLSVAPTFSPNITLGPTYLTTVNSSDSDNGTTRTASTNSIGITISPNGTWLPDNQFTDARTEPWEGNSSTAATTPETFPPSGNSDSKDRRDETP

SEQ ID NO: 2910 - protein, 1621 aa, synthetic construct
  REGION 1..1621: note = PTPRB (P23467) SP+PP+ECD
MLSHGAGLALWITLSLLQTGLAEPERCNFTLAESKASSHSVSIQWRILGSPCNFSLIYSSDTLGAALCPTFRIDNTTYGCNLQDLQAGTIYNFRIISLDEERTVVLQTDPLPPARFGVSKEKTTSTSLHVWWTPSSGKVTSYEVQLFDENNQKIQGVQIQESTSWNEYTFFNLTAGSKYNIAITAVSGGKRSFSVYTNGSTVPSPVKDIGISTKANSLLISWSHGSGNVERYRLMLMDKGILVHGGVVDKHATSYAFHGLTPGYLYNLTVMTEAAGLQNYRWKLVRTAPMEVSNLKVTNDGSLTSLKVKWQRPPGNVDSYNITLSHKGTIKESRVLAPWITETHFKELVPGRLYQVTVSCVSGELSAQKMAVGRTFPDKVANLEANNNGRMRSLVVSWSPPAGDWEQYRILLFNDSVVLLNITVGKEETQYVMDDTGLVPGRQYEVEVIVESGNLKNSERCQGRTVPLAVLQLRVKHANETSLSIMWQTPVAEWEKYIISLADRDLLLIHKSLSKDAKEFTFTDLVPGRKYMATVTSISGDLKNSSSVKGRTVPAQVTDLHVANQGMTSSLFTNWTQAQGDVEFYQVLLIHENVVIKNESISSETSRYSFHSLKSGSLYSVVVTTVSGGISSRQVVVEGRTVPSSVSGVTVNNSGRNDYLSVSWLLAPGDVDNYEVTLSHDGKVVQSLVIAKSVRECSFSSLTPGRLYTVTITTRSGKYENHSFSQERTVPDKVQGVSVSNSARSDYLRVSWVHATGDFDHYEVTIKNKNNFIQTKSIPKSENECVFVQLVPGRLYSVTVTTKSGQYEANEQGNGRTIPEPVKDLTLRNRSTEDLHVTWSGANGDVDQYEIQLLFNDMKVFPPFHLVNTATEYRFTSLTPGRQYKILVLTISGDVQQSAFIEGFTVPSAVKNIHISPNGATDSLTVNWTPGGGDVDSYTVSAFRHSQKVDSQTIPKHVFEHTFHRLEAGEQYQIMIASVSGSLKNQINVVGRTVPASVQGVIADNAYSSYSLIVSWQKAAGVAERYDILLLTENGILLRNTSEPATTKQHKFEDLTPGKKYKIQILTVSGGLFSKEAQTEGRTVPAAVTDLRITENSTRHLSFRWTASEGELSWYNIFLYNPDGNLQERAQVDPLVQSFSFQNLLQGRMYKMVIVTHSGELSNESFIFGRTVPASVSHLRGSNRNTTDSLWFNWSPASGDFDFYELILYNPNGTKKENWKDKDLTEWRFQGLVPGRKYVLWVVTHSGDLSNKVTAESRTAPSPPSLMSFADIANTSLAITWKGPPDWTDYNDFELQWLPRDALTVFNPYNNRKSEGRIVYGLRPGRSYQFNVKTVSGDSWKTYSKPIFGSVRTKPDKIQNLHCRPQNSTAIACSWIPPDSDFDGYSIECRKMDTQEVEFSRKLEKEKSLLNIMMLVPHKRYLVSIKVQSAGMTSEVVEDSTITMIDRPPPPPPHIRVNEKDVLISKSSINFTVNCSWFSDTNGAVKYFTVVVREADGSDELKPEQQHPLPSYLEYRHNASIRVYQTNYFASKCAENPNSNSKSFNIKLGAEMESLGGKCDPTQQKFCDGPLKPHTAYRISIRAFTQLFDEDLKEFTKPLYSDTFFSLPITTESEPLFGAIE

SEQ ID NO: 2911 - protein, 577 aa, synthetic construct
  REGION 1..577: note = PTPRC (P08575) SP+PP+ECD
MTMYLWLKLLAFGFAFLDTEVFVTGQSPTPSPTGLTTAKMPSVPLSSDPLPTHTTAFSPASTFERENDFSETTTSLSPDNTSTQVSPDSLDNASAFNTTGVSSVQTPHLPTHADSQTPSAGTDTQTFSGSAANAKLNPTPGSNAISDVPGERSTASTFPTDPVSPLTTTLSLAHHSSAALPARTSNTTITANTSDAYLNASETTTLSPSGSAVISTTTIATTPSKPTCDEKYANITVDYLYNKETKLFTAKLNVNENVECGNNTCTNNEVHNLTECKNASVSISHNSCTAPDKTLILDVPPGVEKFQLHDCTQVEKADTTICLKWKNIETFTCDTQNITYRFQCGNMIFDNKEIKLENLEPEHEYKCDSEILYNNHKFTNASKIIKTDFGSPGEPQIIFCRSEAAHQGVITWNPPQRSFHNFTLCYIKETEKDCLNLDKNLIKYDLQNLKPYTKYVLSLHAYIIAKVQRNGSAAMCHFTTKSAPPSQVWNMTVSMTSDNSMHVKCRPPRDRNGPHERYHLEVEAGNTLVRNESHKNCDFRVKDLQYSTDYTFKAYFHNGDYPGEPFILHHSTSYNSK

SEQ ID NO: 2912 - protein, 1265 aa, synthetic construct
  REGION 1..1265: note = PTPRD (P23468) SP+PP+ECD
MVHVARLLLLLLTFFLRTDAETPPRFTRTPVDQTGVSGGVASFICQATGDPRPKIVWNKKGKKVSNQRFEVIEFDDGSGSVLRIQPLRTPRDEAIYECVASNNVGEISVSTRLTVLREDQIPRGFPTIDMGPQLKVVERTRTATMLCAASGNPDPEITWFKDFLPVDTSNNNGRIKQLRSESIGGTPIRGALQIEQSEESDQGKYECVATNSAGTRYSAPANLYVRELREVRRVPPRFSIPPTNHEIMPGGSVNITCVAVGSPMPYVKWMLGAEDLTPEDDMPIGRNVLELNDVRQSANYTCVAMSTLGVIEAIAQITVKALPKPPGTPVVTESTATSITLTWDSGNPEPVSYYIIQHKPKNSEELYKEIDGVATTRYSVAGLSPYSDYEFRVVAVNNIGRGPPSEPVLTQTSEQAPSSAPRDVQARMLSSTTILVQWKEPEEPNGQIQGYRVYYTMDPTQHVNNWMKHNVADSQITTIGNLVPQKTYSVKVLAFTSIGDGPLSSDIQVITQTGVPGQPLNFKAEPESETSILLSWTPPRSDTIANYELVYKDGEHGEEQRITIEPGTSYRLQGLKPNSLYYFRLAARSPQGLGASTAEISARTMQSKPSAPPQDISCTSPSSTSILVSWQPPPVEKQNGIITEYSIKYTAVDGEDDKPHEILGIPSDTTKYLLEQLEKWTEYRITVTAHTDVGPGPESLSVLIRTNEDVPSGPPRKVEVEAVNSTSVKVSWRSPVPNKQHGQIRGYQVHYVRMENGEPKGQPMLKDVMLADAQWEFDDTTEHDMIISGLQPETSYSLTVTAYTTKGDGARSKPKLVSTTGAVPGKPRLVINHTQMNTALIQWHPPVDTFGPLQGYRLKFGRKDMEPLTTLEFSEKEDHFTATDIHKGASYVFRLSARNKVGFGEEMVKEISIPEEVPTGFPQNLHSEGTTSTSVQLSWQPPVLAERNGIITKYTLLYRDINIPLLPMEQLIVPADTTMTLTGLKPDTTYDVKVRAHTSKGPGPYSPSVQFRTLPVDQVFAKNFHVKAVMKTSVLLSWEIPENYNSAMPFKILYDDGKMVEEVDGRATQKLIVNLKPEKSYSFVLTNRGNSAGGLQHRVTAKTAPDVLRTKPAFIGKTNLDGMITVQLPEVPANENIKGYYIIIVPLKKSRGKFIKPWESPDEMELDELLKEISRKRRSIRYGREVELKPYIAAHFDVLPTEFTLGDDKHYGGFTNKQLQSGQEYVFFVLAVMEHAESKMYATSPYSDPVVSMDLDPQPITDEEE

SEQ ID NO: 2913 - protein, 1263 aa, synthetic construct
  REGION 1..1263: note = PTPRF (P10586) SP+PP+ECD
MAPEPAPGRTMVPLVPALVMLGLVAGAHGDSKPVFIKVPEDQTGLSGGVASFVCQATGEPKPRITWMKKGKKVSSQRFEVIEFDDGAGSVLRIQPLRVQRDEAIYECTATNSLGEINTSAKLSVLEEEQLPPGFPSIDMGPQLKVVEKARTATMLCAAGGNPDPEISWFKDFLPVDPATSNGRIKQLRSGALQIESSEESDQGKYECVATNSAGTRYSAPANLYVRVRRVAPRFSIPPSSQEVMPGGSVNLTCVAVGAPMPYVKWMMGAEELTKEDEMPVGRNVLELSNVVRSANYTCVAISSLGMIEATAQVTVKALPKPPIDLVVTETTATSVTLTWDSGNSEPVTYYGIQYRAAGTEGPFQEVDGVATTRYSIGGLSPFSEYAFRVLAVNSIGRGPPSEAVRARTGEQAPSSPPRRVQARMLSASTMLVQWEPPEEPNGLVRGYRVYYTPDSRRPPNAWHKHNTDAGLLTTVGSLLPGITYSLRVLAFTAVGDGPPSPTIQVKTQQGVPAQPADFQAEVESDTRIQLSWLLPPQERIIMYELVYWAAEDEDQQHKVTFDPTSSYTLEDLKPDTLYRFQLAARSDMGVGVFTPTIEARTAQSTPSAPPQKVMCVSMGSTTVRVSWVPPPADSRNGVITQYSVAYEAVDGEDRGRHVVDGISREHSSWDLVGLEKWTEYRVWVRAHTDVGPGPESSPVLVRTDEDVPSGPPRKVEVEPLNSTAVHVYWKLPVPSKQHGQIRGYQVTYVRLENGEPRGLPIIQDVMLAEAQWRPEESEDYETTISGLTPETTYSVTVAAYTTKGDGARSKPKIVTTTGAVPGRPTMMISTTAMNTALLQWHPPKELPGELLGYRLQYCRADEARPNTIDFGKDDQHFTVTGLHKGTTYIFRLAAKNRAGLGEEFEKEIRTPEDLPSGFPQNLHVTGLTTSTTELAWDPPVLAERNGRIISYTVVFRDINSQQELQNITTDTRFTLTGLKPDTTYDIKVRAWTSKGSGPLSPSIQSRTMPVEQVFAKNFRVAAAMKTSVLLSWEVPDSYKSAVPFKILYNGQSVEVDGHSMRKLIADLQPNTEYSFVLMNRGSSAGGLQHLVSIRTAPDLLPHKPLPASAYIEDGRFDLSMPHVQDPSLVRWFYIVVVPIDRVGGSMLTPRWSTPEELELDELLEAIEQGGEEQRRRRRQAERLKPYVAAQLDVLPETFTLGDKKNYRGFYNRPLSPDLSYQCFVLASLKEPMDQKRYASSPYSDEIVVQVTPAQQQEEPEMLW

SEQ ID NO: 2914 - protein, 736 aa, synthetic construct
  REGION 1..736: note = PTPRG (P23470) SP+PP+ECD
MRRLLEPCWWILFLKITSSVLHYVVCFPALTEGYVGALHENRHGSAVQIRRRKASGDPYWAYSGAYGPEHWVTSSVSCGGRHQSPIDILDQYARVGEEYQELQLDGFDNESSNKTWMKNTGKTVAILLKDDYFVSGAGLPGRFKAEKVEFHWGHSNGSAGSEHSINGRRFPVEMQIFFYNPDDFDSFQTAISENRIIGAMAIFFQVSPRDNSALDPIIHGLKGVVHHEKETFLDPFVLRDLLPASLGSYYRYTGSLTTPPCSEIVEWIVFRRPVPISYHQLEAFYSIFTTEQQDHVKSVEYLRNNFRPQQRLHDRVVSKSAVRDSWNHDMTDFLENPLGTEASKVCSSPPIHMKVQPLNQTALQVSWSQPETIYHPPIMNYMISYSWTKNEDEKEKTFTKDSDKDLKATISHVSPDSLYLFRVQAVCRNDMRSDFSQTMLFQANTTRIFQGTRIVKTGVPTASPASSADMAPISSGSSTWTSSGIPFSFVSMATGMGPSSSGSQATVASVVTSTLLAGLGFGGGGISSFPSTVWPTRLPTAASASKQAARPVLATTEALASPGPDGDSSPTKDGEGTEEGEKDEKSESEDGEREHEEDGEKDSEKKEKSGVTHAAEERNQTEPSPTPSSPNRTAEGGHQTIPGHEQDHTAVPTDQTGGRRDAGPGLDPDMVTSTQVPPTATEEQYAGSDPKRPEMPSKKPMSRGDRFSEDSRFITVNPAEKNTSGMISRPAPGRME

SEQ ID NO: 2915 - protein, 754 aa, synthetic construct
  REGION 1..754: note = PTPRH (Q9HD43) SP+PP+ECD
MAGAGGGLGVWGNLVLLGLCSWTGARAPAPNPGRNLTVETQTTSSISLSWEVPDGLDSQNSNYWVQCTGDGGTTETRNTTATNVTVDGLGPGSLYTCSVWVEKDGVNSSVGTVTTATAPNPVRNLRVEAQTNSSIALTWEVPDGPDPQNSTYGVEYTGDGGRAGTRSTAHTNITVDGLEPGCLYAFSMWVGKNGINSSRETRNATTAHNPVRNLRVEAQTTSSISLSWEVPDGTDPQNSTYCVQCTGDGGRTETRNTTDTRVTVDGLGPGSLYTCSVWVEKDGVNSSVEIVTSATAPNPVRNLTVEAQTNSSIALTWEVPDGPDPQNSTYGVEYTGDGGRAGTRSTAHTNITVDRLEPGCLYVFSVWVGKNGINSSRETRNATTAPNPVRNLHMETQTNSSIALCWEVPDGPYPQDYTYWVEYTGDGGGTETRNTTNTSVTAERLEPGTLYTFSVWAEKNGARGSRQNVSISTVPNAVTSLSKQDWTNSTIALRWTAPQGPGQSSYSYWVSWVREGMTDPRTQSTSGTDITLKELEAGSLYHLTVWAERNEVRGYNSTLTAATAPNEVTDLQNETQTKNSVMLWWKAPGDPHSQLYVYWVQWASKGHPRRGQDPQANWVNQTSRTNETWYKVEALEPGTLYNFTVWAERNDVASSTQSLCASTYPDTVTITSCVSTSAGYGVNLIWSCPQGGYEAFELEVGGQRGSQDRSSCGEAVSVLGLGPARSYPATITTIWDGMKVVSHSVVCHTESAGV

SEQ ID NO: 2916 - protein, 975 aa, synthetic construct
  REGION 1..975: note = PTPRJ (Q12913) SP+PP+ECD
MKPAAREARLPPRSPGLRWALPLLLLLLRLGQILCAGGTPSPIPDPSVATVATGENGITQISSTAESFHKQNGTGTPQVETNTSEDGESSGANDSLRTPEQGSNGTDGASQKTPSSTGPSPVFDIKAVSISPTNVILTWKSNDTAASEYKYVVKHKMENEKTITVVHQPWCNITGLRPATSYVFSITPGIGNETWGDPRVIKVITEPIPVSDLRVALTGVRKAALSWSNGNGTASCRVLLESIGSHEELTQDSRLQVNISGLKPGVQYNINPYLLQSNKTKGDPLGTEGGLDASNTERSRAGSPTAPVHDESLVGPVDPSSGQQSRDTEVLLVGLEPGTRYNATVYSQAANGTEGQPQAIEFRTNAIQVFDVTAVNISATSLTLIWKVSDNESSSNYTYKIHVAGETDSSNLNVSEPRAVIPGLRSSTFYNITVCPVLGDIEGTPGFLQVHTPPVPVSDFRVTVVSTTEIGLAWSSHDAESFQMHITQEGAGNSRVEITTNQSIIIGGLFPGTKYCFEIVPKGPNGTEGASRTVCNRTVPSAVFDIHVVYVTTTEMWLDWKSPDGASEYVYHLVIESKHGSNHTSTYDKAITLQGLIPGTLYNITISPEVDHVWGDPNSTAQYTRPSNVSNIDVSTNTTAATLSWQNFDDASPTYSYCLLIEKAGNSSNATQVVTDIGITDATVTELIPGSSYTVEIFAQVGDGIKSLEPGRKSFCTDPASMASFDCEVVPKEPALVLKWTCPPGANAGFELEVSSGAWNNATHLESCSSENGTEYRTEVTYLNFSTSYNISITTVSCGKMAAPTRNTCTTGITDPPPPDGSPNITSVSHNSVKVKFSGFEASHGPIKAYAVILTTGEAGHPSADVLKYTYEDFKKGASDTYVTYLIRTEEKGRSQSLSEVLKYEIDVGNESTTLGYYNGKLEPLGSYRACVAGFTNITFHPQNKGLIDGAESYVSFSRYSDAVSLPQDPGVICG

SEQ ID NO: 2917 - protein, 752 aa, synthetic construct
  REGION 1..752: note = PTPRK (Q15262) SP+PP+ECD
MDTTAAAALPAFVALLLLSPWPLLGSAQGQFSAGGCTFDDGPGACDYHQDLYDDFEWVHVSAQEPHYLPPEMPQGSYMIVDSSDHDPGEKARLQLPTMKENDTHCIDFSYLLYSQKGLNPGTLNILVRVNKGPLANPIWNVTGFTGRDWLRAELAVSTFWPNEYQVIFEAEVSGGRSGYIAIDDIQVLSYPCDKSPHFLRLGDVEVNAGQNATFQCIATGRDAVHNKLWLQRRNGEDIPVAQTKNINHRRFAASFRLQEVTKTDQDLYRCVTQSERGSGVSNFAQLIVREPPRPIAPPQLLGVGPTYLLIQLNANSIIGDGPIILKEVEYRMTSGSWTETHAVNAPTYKLWHLDPDTEYEIRVLLTRPGEGGTGLPGPPLITRTKCAEPMRTPKTLKIAEIQARRIAVDWESLGYNITRCHTFNVTICYHYFRGHNESKADCLDMDPKAPQHVVNHLPPYTNVSLKMILTNPEGRKESEETIIQTDEDVPGPVPVKSLQGTSFENKIFLNWKEPLDPNGIITQYEISYSSIRSFDPAVPVAGPPQTVSNLWNSTHHVFMHLHPGTTYQFFIRASTVKGFGPATAINVTTNISAPTLPDYEGVDASLNETATTITVLLRPAQAKGAPISAYQIVVEELHPHRTKREAGAMECYQVPVTYQNAMSGGAPYYFAAELPPGNLPEPAPFTVGDNRTYQGFWNPPLAPRKGYNIYFQAMSSVEKETKTQCVRIATKAATEEPEVIPDPAKQTDRVVK

SEQ ID NO: 2918 - protein, 742 aa, synthetic construct
  REGION 1..742: note = PTPRM (P28827) SP+PP+ECD
MRGLGTCLATLAGLLLTAAGETFSGGCLFDEPYSTCGYSQSEGDDFNWEQVNTLTKPTSDPWMPSGSFMLVNASGRPEGQRAHLLLPQLKENDTHCIDFHYFVSSKSNSPPGLLNVYVKVNNGPLGNPIWNISGDPTRTWNRAELAISTFWPNFYQVIFEVITSGHQGYLAIDEVKVLGHPCTRTPHFLRIQNVEVNAGQFATFQCSAIGRTVAGDRLWLQGIDVRDAPLKEIKVTSSRRFIASFNVVNTTKRDAGKYRCMIRTEGGVGISNYAELVVKEPPVPIAPPQLASVGATYLWIQLNANSINGDGPIVAREVEYCTASGSWNDRQPVDSTSYKIGHLDPDTEYEISVLLTRPGEGGTGSPGPALRTRTKCADPMRGPRKLEVVEVKSRQITIRWEPFGYNVTRCHSYNLTVHYCYQVGGQEQVREEVSWDTENSHPQHTITNLSPYTNVSVKLILMNPEGRKESQELIVQTDEDLPGAVPTESIQGSTFEEKIFLQWREPTQTYGVITLYEITYKAVSSFDPEIDLSNQSGRVSKLGNETHFLFFGLYPGTTYSFTIRASTAKGFGPPATNQFTTKISAPSMPAYELETPLNQTDNTVTVMLKPAHSRGAPVSVYQIVVEEERPRRTKKTTEILKCYPVPIHFQNASLLNSQYYFAAEFPADSLQAAQPFTIGDNKTYNGYWNTPLLPYKSYRIYFQAASRANGETKIDCVQVATKGAATPKPVPEPEKQTDHTVK

SEQ ID NO: 2919 - protein, 575 aa, synthetic construct
  REGION 1..575: note = PTPRN (Q16849) SP+PP+ECD
MRRPRRPGGLGGSGGLRLLLCLLLLSSRPGGCSAVSAHGCLFDRRLCSHLEVCIQDGLFGQCQVGVGQARPLLQVTSPVLQRLQGVLRQLMSQGLSWHDDLTQYVISQEMERIPRLRPPEPRPRDRSGLAPKRPGPAGELLLQDIPTGSAPAAQHRLPQPPVGKGGAGASSSLSPLQAELLPPLLEHLLLPPQPPHPSLSYEPALLQPYLFHQFGSRDGSRVSEGSPGMVSVGPLPKAEAPALFSRTASKGIFGDHPGHSYGDLPGPSPAQLFQDSGLLYLAQELPAPSRARVPRLPEQGSSSRAEDSPEGYEKEGLGDRGEKPASPAVQPDAALQRLAAVLAGYGVELRQLTPEQLSTLLTLLQLLPKGAGRNPGGVVNVGADIKKTMEGPVEGRDTAELPARTSPMPGHPTASPTSSEVQQVPSPVSSEPPKAARPPVTPVLLEKKSPLGQSQPTVAGQPSARPAAEEYGYIVTDQKPLSLAAGVKLLEILAEHVHMSSGSFINISVVGPALTFRIRHNEQNLSLADVTQQAGLVKSELEAQTGLQILQTGVGQREEAAAVLPQTAHSTSPMR

SEQ ID NO: 2920 - protein, 615 aa, synthetic construct
  REGION 1..615: note = PTPRN2 (Q92932) SP+PP+ECD
MGPPLPLLLLLLLLLPPRVLPAAPSSVPRGRQLPGRLGCLLEEGLCGASEACVNDGVFGRCQKVPAMDFYRYEVSPVALQRLRVALQKLSGTGFTWQDDYTQYVMDQELADLPKTYLRRPEASSPARPSKHSVGSERRYSREGGAALANALRRHLPFLEALSQAPASDVLARTHTAQDRPPAEGDDRFSESILTYVAHTSALTYPPGSRTQLREDLLPRTLGQLQPDELSPKVDSGVDRHHLMAALSAYAAQRPPAPPGEGSLEPQYLLRAPSRMPRPLLAPAAPQKWPSPLGDSEDPSSTGDGARIHTLLKDLQRQPAEVRGLSGLELDGMAELMAGLMQGVDHGVARGSPGRAALGESGEQADGPKATLRGDSFPDDGVQDDDDRLYQEVHRLSATLGGLLQDHGSRLLPGALPFARPLDMERKKSEHPESSLSSEEETAGVENVKSQTYSKDLLGQQPHSEPGAAAFGELQNQMPGPSKEEQSLPAGAQEALSDGLQLEVQPSEEEARGYIVTDRDPLRPEEGRRLVEDVARLLQVPSSAFADVEVLGPAVTFKVSANVQNVTTEDVEKATVDNKDKLEETSGLKILQTGVGSKSKLKFLPPQAEQEDSTKF

SEQ ID NO: 2921 - protein, 822 aa, synthetic construct
  REGION 1..822: note = PTPRO (Q16827) SP+PP+ECD
MGHLPTGIHGARRLLPLLWLFVLFKNATAFHVTVQDDNNIVVSLEASDVISPASVYVVKITGESKNYFFEFEEFNSTLPPPVIFKASYHGLYYIITLVVVNGNVVTKPSRSITVLTKPLPVTSVSIYDYKPSPETGVLFEIHYPEKYNVFTRVNISYWEGKDFRTMLYKDFFKGKTVFNHWLPGMCYSNITFQLVSEATFNKSTLVEYSGVSHEPKQHRTAPYPPQNISVRIVNLNKNNWEEQSGNFPEESFMRSQDTIGKEKLFHFTEETPEIPSGNISSGWPDFNSSDYETTSQPYWWDSASAAPESEDEFVSVLPMEYENNSTLSETEKSTSGSFSFFPVQMILTWLPPKPPTAFDGFHIHIEREENFTEYLMVDEEAHEFVAELKEPGKYKLSVTTFSSSGSCETRKSQSAKSLSFYISPSGEWIEELTEKPQHVSVHVLSSTTALMSWTSSQENYNSTIVSVVSLTCQKQKESQRLEKQYCTQVNSSKPIIENLVPGAQYQVVIYLRKGPLIGPPSDPVTFAIVPTGIKDLMLYPLGPTAVVLSWTRPYLGVFRKYVVEMFYFNPATMTSEWTTYYEIAATVSLTASVRIANLLPAWYYNFRVTMVTWGDPELSCCDSSTISFITAPVAPEITSVEYFNSLLYISWTYGDDTTDLSHSRMLHWMVVAEGKKKIKKSVTRNVMTAILSLPPGDIYNLSVTACTERGSNTSMLRLVKLEPAPPKSLFAVNKTQTSVTLLWVEEGVADFFEVFCQQVGSSQKTKLQEPVAVSSHVVTISSLLPATAYNCSVTSFSHDSPSVPTFIAVSTMVTEMNPNVVV

SEQ ID NO: 2922 - protein, 1947 aa, synthetic construct
  REGION 1..1947: note = PTPRQ (Q9UMZ3) SP+PP+ECD
MKKVPIKPEQPEKLRAFNISTHSFSLHWSLPSGHVERYQVDLVPDSGFVTIRDLGGGEYQVDVSNVVPGTRYDITISSISTTYTSPVTRIVTTNVTKPGPPVFLAGERVGSAGILLSWNTPPNPNGRIISYIVKYKEVCPWMQTVYTQVRSKPDSLEVLLTNLNPGTTYEIKVAAENSAGIGVFSDPFLFQTAESAPGKVVNLTVEAYNASAVKLIWYLPRQPNGKITSFKISVKHARSGIVVKDVSIRVEDILTGKLPECNENSESFLWSTASPSPTLGRVTPPSRTTHSSSTLTQNEISSVWKEPISFVVTHLRPYTTYLFEVSAVTTEAGYIDSTIVRTPESVPEGPPQNCVTGNITGKSFSILWDPPTIVTGKFSYRVELYGPSGRILDNSTKDLKFAFTNLTPFTMYDVYIAAETSAGTGPKSNISVFTPPDVPGAVFDLQLAEVESTQVRITWKKPRQPNGIINQYRVKVLVPETGIILENTLLTGNNEYINDPMAPEIVNIVEPMVGLYEGSAEMSSDLHSLATFIYNSHPDKNFPARNRAEDQTSPVVTTRNQYITDIAAEQLSYVIRRLVPFTEHMISVSAFTIMGEGPPTVLSVRTRQQVPSSIKIINYKNISSSSILLYWDPPEYPNGKITHYTIYAMELDTNRAFQITTIDNSFLITGLKKYTKYKMRVAASTHVGESSLSEENDIFVRTSEDEPESSPQDVEVIDVTADEIRLKWSPPEKPNGIIIAYEVLYKNIDTLYMKNTSTTDIILRNLRPHTLYNISVRSYTRFGHGNQVSSLLSVRTSETVPDSAPENITYKNISSGEIELSFLPPSSPNGIIKKYTIYLKRSNGNEERTINTTSLTQNIKVLKKYTQYIIEVSASTLKGEGVRSAPISILTEEDAPDSPPQDFSVKQLSGVTVKLSWQPPLEPNGIILYYTVYVWNRSSLKTINVTETSLELSDLDYNVEYSAYVTASTRFGDGKTRSNIISFQTPEGAPSDPPKDVYYANLSSSSIILFWTPPSKPNGIIQYYSVYYRNTSGTFMQNFTLHEVTNDFDNMTVSTIIDKLTIFSYYTFWLTASTSVGNGNKSSDIIEVYTDQDIPEGFVGNLTYESISSTAINVSWVPPAQPNGLVFYYVSLILQQTPRHVRPPLVTYERSIYFDNLEKYTDYILKITPSTEKGFSDTYTAQLYIKTEEDVPETSPIINTFKNLSSTSVLLSWDPPVKPNGAIISYDLTLQGPNENYSFITSDNYIILEELSPFTLYSFFAAARTRKGLGPSSILFFYTDESVPLAPPQNLTLINCTSDFVWLKWSPSPLPGGIVKVYSFKIHEHETDTIYYKNISGFKTEAKLVGLEPVSTYSIRVSAFTKVGNGNQFSNVVKFTTQESVPDVVQNMQCMATSWQSVLVKWDPPKKANGIITQYMVTVERNSTKVSPQDHMYTFIKLLANTSYVFKVRASTSAGEGDESTCHVSTLPETVPSVPTNIAFSDVQSTSATLTWIRPDTILGYFQNYKITTQLRAQKCKEWESEECVEYQKIQYLYEAHLTEETVYGLKKFRWYRFQVAASTNAGYGNASNWISTKTLPGPPDGPPENVHVVATSPFSISISWSEPAVITGPTCYLIDVKSVDNDEFNISFIKSNEENKTIEIKDLEIFTRYSVVITAFTGNISAAYVEGKSSAEMIVTTLESAPKDPPNNMTFQKIPDEVTKFQLTFLPPSQPNGNIQVYQALVYREDDPTAVQIHNLSIIQKTNTFVIAMLEGLKGGHTYNISVYAVNSAGAGPKVPMRITMDIKAPARPKTKPTPIYDATGKLLVTSTTITIRMPICYYSDDHGPIKNVQVLVTETGAQHDGNVTKWYDAYFNKARPYFTNEGFPNPPCTEGKTKFSGNEEIYIIGADNACMIPGNEDKICNGPLKPKKQYLFKFRATNIMGQFTDSDYSDPVKTLGEGLSERTVE

SEQ ID NO: 2923 - protein, 227 aa, synthetic construct
  REGION 1..227: note = PTPRR (Q15256) SP+PP+ECD
MRRAVCFPALCLLLNLHAAGCFSGNNDHFLAINQKKSGKPVFIYKHSQDIEKSLDIAPQKIYRHSYHSSSEAQVSKRHQIVNSAFPRPAYDPSLNLLAMDGQDLEVENLPIPAANVIVVTLQMDVNKLNITLLRIFRQGVAAALGLLPQQVHINRLIGKKNSIELFVSPINRKTGISDALPSEEVLRSLNINVLHQSLSQFGITEVSPEKNVLQGQHEADKIWSKEG

SEQ ID NO: 2924 - protein, 1282 aa, synthetic construct
  REGION 1..1282: note = PTPRS (Q13332) SP+PP+ECD
MAPTWGPGMVSVVGPMGLLVVLLVGGCAAEEPPRFIKEPKDQIGVSGGVASFVCQATGDPKPRVTWNKKGKKVNSQRFETIEFDESAGAVLRIQPLRTPRDENVYECVAQNSVGEITVHAKLTVLREDQLPSGFPNIDMGPQLKVVERTRTATMLCAASGNPDPEITWFKDFLPVDPSASNGRIKQLRSETFESTPIRGALQIESSEETDQGKYECVATNSAGVRYSSPANLYVRELREVRRVAPRFSILPMSHEIMPGGNVNITCVAVGSPMPYVKWMQGAEDLTPEDDMPVGRNVLELTDVKDSANYTCVAMSSLGVIEAVAQITVKSLPKAPGTPMVTENTATSITITWDSGNPDPVSYYVIEYKSKSQDGPYQIKEDITTTRYSIGGLSPNSEYEIWVSAVNSIGQGPPSESVVTRTGEQAPASAPRNVQARMLSATTMIVQWEEPVEPNGLIRGYRVYYTMEPEHPVGNWQKHNVDDSLLTTVGSLLEDETYTVRVLAFTSVGDGPLSDPIQVKTQQGVPGQPMNLRAEARSETSITLSWSPPRQESIIKYELLFREGDHGREVGRTFDPTTSYVVEDLKPNTEYAFRLAARSPQGLGAFTPVVRQRTLQSKPSAPPQDVKCVSVRSTAILVSWRPPPPETHNGALVGYSVRYRPLGSEDPEPKEVNGIPPTTTQILLEALEKWTQYRITTVAHTEVGPGPESSPVVVRTDEDVPSAPPRKVEAEALNATAIRVLWRSPAPGRQHGQIRGYQVHYVRMEGAEARGPPRIKDVMLADAQWETDDTAEYEMVITNLQPETAYSITVAAYTMKGDGARSKPKVVVTKGAVLGRPTLSVQQTPEGSLLARWEPPAGTAEDQVLGYRLQFGREDSTPLATLEFPPSEDRYTASGVHKGATYVFRLAARSRGGLGEEAAEVLSIPEDTPRGHPQILEAAGNASAGTVLLRWLPPVPAERNGAIVKYTVAVREAGALGPARETELPAAAEPGAENALTLQGLKPDTAYDLQVRAHTRRGPGPFSPPVRYRTFLRDQVSPKNFKVKMIMKTSVLLSWEFPDNYNSPTPYKIQYNGLTLDVDGRTTKKLITHLKPHTFYNFVLTNRGSSLGGLQQTVTAWTAFNLLNGKPSVAPKPDADGFIMVYLPDGQSPVPVQSYFIVMVPLRKSRGGQFLTPLGSPEDMDLEELIQDISRLQRRSLRHSRQLEVPRPYIAARFSVLPPTFHPGDQKQYGGFDNRGLEPGHRYVLFVLAVLQKSEPTFAASPFSDPFQLDNPDPQPIVDGEEG

SEQ ID NO: 2925 - protein, 747 aa, synthetic construct
  REGION 1..747: note = PTPRT (O14522) SP+PP+ECD
MASLAALALSLLLRLQLPPLPGARAQSAAGGCSFDEHYSNCGYSVALGTNGFTWEQINTWEKPMLDQAVPTGSFMMVNSSGRASGQKAHLLLPTLKENDTHCIDFHYYFSSRDRSSPGALNVYVKVNGGPQGNPVWNVSGVVTEGWVKAELAISTFWPHFYQVIFESVSLKGHPGYIAVDEVRVLAHPCRKAPHFLRLQNVEVNVGQNATFQCIAGGKWSQHDKLWLQQWNGRDTALMVTRVVNHRRFSATVSVADTAQRSVSKYRCVIRSDGGSGVSNYAELIVKEPPTPIAPPELLAVGATYLWIKPNANSIIGDGPIILKEVEYRTTTGTWAETHIVDSPNYKLWHLDPDVEYEIRVLLTRPGEGGTGPPGPPLTTRTKCADPVHGPQNVEIVDIRARQLTLQWEPFGYAVTRCHSYNLTVQYQYVFNQQQYEAEEVIQTSSHYTLRGLRPFMTIRLRLLLSNPEGRMESEELVVQTEEDVPGAVPLESIQGGPFEEKIYIQWKPPNETNGVITLYEINYKAVGSLDPSADLSSQRGKVFKLRNETHHLFVGLYPGTTYSFTIKASTAKGFGPPVTTRIATKISAPSMPEYDTDTPLNETDTTITVMLKPAQSRGAPVSVYQLVVKEERLQKSRRAADIIECFSVPVSYRNASSLDSLHYFAAELKPANLPVTQPFTVGDNKTYNGYWNPPLSPLKSYSIYFQALSKANGETKINCVRLATKGASTQNSNTVEPEKQVDNTVKM

SEQ ID NO: 2926 - protein, 749 aa, synthetic construct
  REGION 1..749: note = PTPRU (Q92729) SP+PP+ECD
MARAQALVLALTFQLCAPETETPAAGCTFEEASDPAVPCEYSQAQYDDFQWEQVRIHPGTRAPADLPHGSYLMVNTSQHAPGQRAHVIFQSLSENDTHCVQFSYFLYSRDGHSPGTLGVYVRVNGGPLGSAVWNMTGSHGRQWHQAELAVSTFWPNEYQVLFEALISPDRRGYMGLDDILLLSYPCAKAPHFSRLGDVEVNAGQNASFQCMAAGRAAEAERFLLQRQSGALVPAAGVRHISHRRFLATFPLAAVSRAEQDLYRCVSQAPRGAGVSNFAELIVKEPPTPIAPPQLLRAGPTYLIIQLNTNSIIGDGPIVRKEIEYRMARGPWAEVHAVSLQTYKLWHLDPDTEYEISVLLTRPGDGGTGRPGPPLISRTKCAEPMRAPKGLAFAEIQARQLTLQWEPLGYNVTRCHTYTVSLCYHYTLGSSHNQTIRECVKTEQGVSRYTIKNLLPYRNVHVRLVLTNPEGRKEGKEVTFQTDEDVPSGIAAESLTFTPLEDMIFLKWEEPQEPNGLITQYEISYQSIESSDPAVNVPGPRRTISKLRNETYHVFSNLHPGTTYLFSVRARTGKGFGQAALTEITTNISAPSFDYADMPSPLGESENTITVLLRPAQGRGAPISVYQVIVEEERARRLRREPGGQDCFPVPLTFEAALARGLVHYFGAELAASSLPEAMPFTVGDNQTYRGFWNPPLEPRKAYLIYFQAASHLKGETRLNCIRIARKAACKESKRPLEVSQRSEEMGLIL

SEQ ID NO: 2927 - protein, 1636 aa, synthetic construct
  REGION 1..1636: note = PTPRZ1 (P23471) SP+PP+ECD
MRILKRFLACIQLLCVCRLDWANGYYRQQRKLVEEIGWSYTGALNQKNWGKKYPTCNSPKQSPINIDEDLTQVNVNLKKLKFQGWDKTSLENTFIHNTGKTVEINLTNDYRVSGGVSEMVFKASKITFHWGKCNMSSDGSEHSLEGQKFPLEMQIYCFDADRFSSFEEAVKGKGKLRALSILFEVGTEENLDFKAIIDGVESVSRFGKQAALDPFILLNLLPNSTDKYYIYNGSLTSPPCTDTVDWIVFKDTVSISESQLAVFCEVLTMQQSGYVMLMDYLQNNFREQQYKFSRQVFSSYTGKEEIHEAVCSSEPENVQADPENYTSLLVTWERPRVVYDTMIEKFAVLYQQLDGEDQTKHEFLTDGYQDLGAILNNLLPNMSYVLQIVAICTNGLYGKYSDQLIVDMPTDNPELDLFPELIGTEEIIKEEEEGKDIEEGAIVNPGRDSATNQIRKKEPQISTTTHYNRIGTKYNEAKTNRSPTRGSEFSGKGDVPNTSLNSTSQPVTKLATEKDISLTSQTVTELPPHTVEGTSASLNDGSKTVLRSPHMNLSGTAESLNTVSITEYEEESLLTSFKLDTGAEDSSGSSPATSAIPFISENISQGYIFSSENPETITYDVLIPESARNASEDSTSSGSEESLKDPSMEGNVWFPSSTDITAQPDVGSGRESFLQTNYTEIRVDESEKTTKSFSAGPVMSQGPSVTDLEMPHYSTFAYFPTEVTPHAFTPSSRQQDLVSTVNVVYSQTTQPVYNGETPLQPSYSSEVFPLVTPLLLDNQILNTTPAASSSDSALHATPVFPSVDVSFESILSSYDGAPLLPFSSASFSSELFRHLHTVSQILPQVTSATESDKVPLHASLPVAGGDLLLEPSLAQYSDVLSTTHAASETLEFGSESGVLYKTLMFSQVEPPSSDAMMHARSSGPEPSYALSDNEGSQHIFTVSYSSAIPVHDSVGVTYQGSLFSGPSHIPIPKSSLITPTASLLQPTHALSGDGEWSGASSDSEFLLPDTDGLTALNISSPVSVAEFTYTTSVFGDDNKALSKSEIIYGNETELQIPSFNEMVYPSESTVMPNMYDNVNKLNASLQETSVSISSTKGMFPGSLAHTTTKVFDHEISQVPENNFSVQPTHTVSQASGDTSLKPVLSANSEPASSDPASSEMLSPSTQLLFYETSASFSTEVLLQPSFQASDVDTLLKTVLPAVPSDPILVETPKVDKISSTMLHLIVSNSASSENMLHSTSVPVFDVSPTSHMHSASLQGLTISYASEKYEPVLLKSESSHQVVPSLYSNDELFQTANLEINQAHPPKGRHVFATPVLSIDEPLNTLINKLIHSDEILTSTKSSVTGKVFAGIPTVASDTFVSTDHSVPIGNGHVAITAVSPHRDGSVTSTKLLFPSKATSELSHSAKSDAGLVGGGEDGDTDDDGDDDDDDRGSDGLSIHKCMSCSSYRESQEKVMNDSDTHENSLMDQNNPISYSLSENSEEDNRVTSVSSDSQTGMDRSPGKSPSANGLSQKHNDGKEENDIQTGSALLPLSPESKAWAVLTSDEESGSGQGTSDSLNENETSTDFSFADTNEKDADGILAAGDSEITPGFPQSPTSSVTSENSEVFHVSEAEASNSSHESRIGLAEGLESEKK

SEQ ID NO: 2928 - protein, 96 aa, synthetic construct
  REGION 1..96: note = PTTG1IP (P53801) SP+PP+ECD
MAPGVARGPTPYWRLRLGGAALLLLLIPVAAAQEPPGAACSQNTNKTCEECLKNVSCLWCNTNKACLDYPVTSVLPPASLCKLSSARWGVCWVNFE

SEQ ID NO: 2929 - protein, 343 aa, synthetic construct
  REGION 1..343: note = PVR (P15151) SP+PP+ECD
MARAMAAAWPLLLVALLVLSWPPPGTGDVVVQAPTQVPGFLGDSVTLPCYLQVPNMEVTHVSQLTWARHGESGSMAVFHQTQGPSYSESKRLEFVAARLGAELRNASLRMFGLRVEDEGNYTCLFVTFPQGSRSVDIWLRVLAKPQNTAEVQKVQLTGEPVPMARCVSTGGRPPAQITWHSDLGGMPNTSQVPGFLSGTVTVTSLWILVPSSQVDGKNVTCKVEHESFEKPQLLTVNLTVYYPPEVSISGYDNNWYLGQNEATLTCDARSNPEPTGYNWSTTMGPLPPFAVAQGAQLLIRPVDKPINTTLICNVTNALGARQAELTVQVKEGPPSEHSGISRN

SEQ ID NO: 2930 - protein, 355 aa, synthetic construct
  REGION 1..355: note = PVRL1 (Q15223) SP+PP+ECD
MARMGLAGAAGRWWGLALGLTAFFLPGVHSQVVQVNDSMYGFIGTDVVLHCSFANPLPSVKITQVTWQKSTNGSKQNVAIYNPSMGVSVLAPYRERVEFLRPSFTDGTIRLSRLELEDEGVYICEFATFPTGNRESQLNLTVMAKPTNWIEGTQAVLRAKKGQDDKVLVATCTSANGKPPSVVSWETRLKGEAEYQEIRNPNGTVTVISRYRLVPSREAHQQSLACIVNYHMDRFKESLTLNVQYEPEVTIEGFDGNWYLQRMDVKLTCKADANPPATEYHWTTLNGSLPKGVEAQNRTLFFKGPINYSLAGTYICEATNPIGTRSGQVEVNITEFPYTPSPPEHGRRAGPVPTA

SEQ ID NO: 2931 - protein, 360 aa, synthetic construct
  REGION 1..360: note = PVRL2 (Q92692) SP+PP+ECD
MARAAALLPSRSPPTPLLWPLLLLLLLETGAQDVRVQVLPEVRGQLGGTVELPCHLLPPVPGLYISLVTWQRPDAPANHQNVAAFHPKMGPSFPSPKPGSERLSFVSAKQSTGQDTEAELQDATLALHGLTVEDEGNYTCEFATFPKGSVRGMTWLRVIAKPKNQAEAQKVTFSQDPTTVALCISKEGRPPARISWLSSLDWEAKETQVSGTLAGTVTVTSRFTLVPSGRADGVTVTCKVEHESFEEPALIPVTLSVRYPPEVSISGYDDNWYLGRTDATLSCDVRSNPEPTGYDWSTTSGTFPTSAVAQGSQLVIHAVDSLFNTTFVCTVTNAVGMGRAEQVIFVRETPNTAGAGATGG

SEQ ID NO: 2932 - protein, 404 aa, synthetic construct
  REGION 1..404: note = PVRL3 (Q9NQS3) SP+PP+ECD
MARTLRPSPLCPGGGKAQLSSASLLGAGLLLQPPTPPPLLLLLFPLLLFSRLCGALAGPIIVEPHVTAVWGKNVSLKCLIEVNETITQISWEKIHGKSSQTVAVHHPQYGFSVQGEYQGRVLFKNYSLNDATITLHNIGFSDSGKYICKAVTFPLGNAQSSTTVTVLVEPTVSLIKGPDSLIDGGNETVAAICIAATGKPVAHIDWEGDLGEMESTTTSFPNETATIISQYKLFPTRFARGRRITCVVKHPALEKDIRYSFILDIQYAPEVSVTGYDGNWFVGRKGVNLKCNADANPPPFKSVWSRLDGQWPDGLLASDNTLHFVHPLTFNYSGVYICKVTNSLGQRSDQKVIYISDPPTTTTLQPTIQWHPSTADIEDLATEPKKLPFPLSTLATIKDDTIAT

SEQ ID NO: 2933 - protein, 349 aa, synthetic construct
  REGION 1..349: note = PVRL4 (Q96NY8) SP+PP+ECD
MPLSLGAEMWGPEAWLLLLLLLASFTGRCPAGELETSDVVTVVLGQDAKLPCFYRGDSGEQVGQVAWARVDAGEGAQELALLHSKYGLHVSPAYEGRVEQPPPPRNPLDGSVLLRNAVQADEGEYECRVSTFPAGSFQARLRLRVLVPPLPSLNPGPALEEGQGLTLAASCTAEGSPAPSVTWDTEVKGTTSSRSFKHSRSAAVTSEFHLVPSRSMNGQPLTCVVSHPGLLQDQRITHILHVSFLAEASVRGLEDQNLWHIGREGAMLKCLSEGQPPPSYNWTRLDGPLPSGVRVDGDTLGFPPLTTEHSGIYVCHVSNEFSSRDSQVTVDVLDPQEDSGKQVDLVSAS

SEQ ID NO: 2934 - protein, 709 aa, synthetic construct
  REGION 1..709: note = QSOX1 (O00391) SP+PP+ECD
MRRCNSGSGPPPSLLLLLLWLLAVPGANAAPRSALYSPSDPLTLLQADTVRGAVLGSRSAWAVEFFASWCGHCIAFAPTWKALAEDVKAWRPALYLAALDCAEETNSAVCRDFNIPGFPTVRFFKAFTKNGSGAVFPVAGADVQTLRERLIDALESHHDTWPPACPPLEPAKLEEIDGFFARNNEEYLALIFEKGGSYLGREVALDLSQHKGVAVRRVLNTEANVVRKFGVTDFPSCYLLFRNGSVSRVPVLMESRSFYTAYLQRLSGLTREAAQTTVAPTTANKIAPTVWKLADRSKIYMADLESALHYILRIEVGRFPVLEGQRLVALKKFVAVLAKYFPGRPLVQNFLHSVNEWLKRQKRNKIPYSFFKTALDDRKEGAVLAKKVNWIGCQGSEPHFRGFPCSLWVLFHFLTVQAARQNVDHSQEAAKAKEVLPAIRGYVHYFFGCRDCASHFEQMAAASMHRVGSPNAAVLWLWSSHNRVNARLAGAPSEDPQFPKVQWPPRELCSACHNERLDVPVWDVEATLNFLKAHFSPSNIILDFPAAGSAARRDVQNVAAAPELAMGALELESRNSTLDPGKPEMMKSPTNTTPHVPAEGPEASRPPKLHPGLRAAPGQEPPEHMAELQRNEQEQPLGQWHLSKRDTGAALLAESRAEKNRLWGPLEVRRVGRSSKQLVDIPEGQLEARAGRGRGQWLQVLGGGFSYLD

SEQ ID NO: 2935 - protein, 661 aa, synthetic construct
  REGION 1..661: note = QSOX2 (Q6ZRP7) SP+PP+ECD
MAAAGAAVARSPGIGAGPALRARRSPPPRAARLPRLLVLLAAAAVGPGAGGAARLYRAGEDAVWVLDSGSVRGATANSSAAWLVQFYSSWCGHCIGYAPTWRALAGDVRDWASAIRVAALDCMEEKNQAVCHDYDIHFYPTFRYFKAFTKEFTTGENFKGPDRELRTVRQTMIDFLQNHTEGSRPPACPRLDPIQPSDVLSLLDNRGSHYVAIVFESNSSYLGREVILDLIPYESIVVTRALDGDKAFLEKLGVSSVPSCYLIYPNGSHGLINVVKPLRAFFSSYLKSLPDVRKKSLPLPEKPHKEENSEIVVWREFDKSKLYTVDLESGLHYLLRVELAAHKSLAGAELKTLKDFVTVLAKLFPGRPPVKKLLEMLQEWLASLPLDRIPYNAVLDLVNNKMRISGIFLTNHIKWVGCQGSRSELRGYPCSLWKLFHTLTVEASTHPDALVGTGFEDDPQAVLQTMRRYVHTFFGCKECGEHFEEMAKESMDSVKTPDQAILWLWKKHNMVNGRLAGHLSEDPRFPKLQWPTPDLCPACHEEIKGLASWDEGHVLTFLKQHYGRDNLLDTYSADQGDSSEGGTLARGEEEEKRLTPPEVSHGDRDTQSVRPPGALGPRPALPESLHHSLDGKLQSLDGPGAHKEVGGAAPFLGVDFSSLDM

SEQ ID NO: 2936 - protein, 225 aa, synthetic construct
  REGION 1..225: note = RAET1E (Q8TD07) SP+PP+ECD
MRRISLTSSPVRLLLFLLLLLIALEIMVGGHSLCFNFTIKSLSRPGQPWCEAQVFLNKNLFLQYNSDNNMVKPLGLLGKKVYATSTWGELTQTLGEVGRDLRMLLCDIKPQIKTSDPSTLQVEMFCQREAERCTGASWQFATNGEKSLLFDAMNMTWTVINHEASKIKETWKKDRGLEKYFRKLSKGDCDHWLREFLGHWEAMPEPTVSPVNASDIHWSSSSLPD

SEQ ID NO: 2937 - protein, 223 aa, synthetic construct
  REGION 1..223: note = RAET1G (Q6H3X3) SP+PP+ECD
MAAAASPAFLLRLPLLLLLSSWCRTGLADPHSLCYDITVIPKFRPGPRWCAVQGQVDEKTFLHYDCGSKTVTPVSPLGKKLNVTTAWKAQNPVLREVVDILTEQLLDIQLENYIPKEPLTLQARMSCEQKAEGHGSGSWQLSFDGQIFLLFDSENRMWTTVHPGARKMKEKWENDKDMTMSFHYISMGDCTGWLEDFLMGMDSTLEPSAGAPPTMSSGTAQPR

SEQ ID NO: 2938 - protein, 145 aa, synthetic construct
  REGION 1..145: note = RAMP2 (O60895) SP+PP+ECD
MASLRVERAGGPRLPRTRVGRPAALRLLLLLGAVLNPHEALAQPLPTTGTPGSEGGTVKNYETAVQFCWNHYKDQMDPIEKDWCDWAMISRPYSTLRDCLEHFAELFDLGFPNPLAERIIFETHQIHFANCSLVQPTFSDPPEDV

SEQ ID NO: 2939 - protein, 118 aa, synthetic construct
  REGION 1..118: note = RAMP3 (O60896) SP+PP+ECD
METGALRRPQLLPLLLLLCGGCPRAGGCNETGMLERLPLCGKAFADMMGKVDVWKWCNLSEFIVYYESFTNCTEMEANVVGCYWPNPLAQGFITGIHRQFFSNCTVDRVHLEDPPDEV

SEQ ID NO: 2940 - protein, 57 aa, synthetic construct
  REGION 1..57: note = RELL1 (Q8IUW5) SP+PP+ECD
MAPRALPGSAVLAAAVFVGGAVSSPLVAPDNGSSRTLHSRTETTPSPSNDTGNGHPE

SEQ ID NO: 2941 - protein, 162 aa, synthetic construct
  REGION 1..162: note = RELT (Q969Z4) SP+PP+ECD
MKPSLLCRPLSCFLMLLPWPLATLTSTTLWQCPPGEEPDLDPGQGTLCRPCPPGTFSAAWGSSPCQPHARCSLWRRLEAQVGMATRDTLCGDCWPGWFGPWGVPRVPCQPCSWAPLGTHGCDEWGRRARRGVEVAAGASSGGETRQPGNGTRAGGPEETAAQ

SEQ ID NO: 2942 - protein, 635 aa, synthetic construct
  REGION 1..635: note = RET (P07949) SP+PP+ECD
MAKATSGAAGLRLLLLLLLPLLGKVALGLYFSRDAYWEKLYVDQAAGTPLLYVHALRDAPEEVPSFRLGQHLYGTYRTRLHENNWICIQEDTGLLYLNRSLDHSSWEKLSVRNRGFPLLTVYLKVFLSPTSLREGECQWPGCARVYFSFFNTSFPACSSLKPRELCFPETRPSFRIRENRPPGTFHQFRLLPVQFLCPNISVAYRLLEGEGLPFRCAPDSLEVSTRWALDREQREKYELVAVCTVHAGAREEVVMVPFPVTVYDEDDSAPTFPAGVDTASAVVEFKRKEDTVVATLRVFDADVVPASGELVRRYTSTLLPGDTWAQQTFRVEHWPNETSVQANGSFVRATVHDYRLVLNRNLSISENRTMQLAVLVNDSDFQGPGAGVLLLHFNVSVLPVSLHLPSTYSLSVSRRARRFAQIGKVCVENCQAFSGINVQYKLHSSGANCSTLGVVTSAEDTSGILFVNDTKALRRPKCAELHYMVVATDQQTSRQAQAQLLVTVEGSYVAEEAGCPLSCAVSKRRLECEECGGLGSPTGRCEWRQGDGKGITRNFSTCSPSTKTCPDGHCDVVETQDINICPQDCLRGSIVGGHEPGEPRGIKAGYGTCNCFPEEEKCFCEPEDIQDPLCDELCR

SEQ ID NO: 2943 - protein, 207 aa, synthetic construct
  REGION 1..207: note = RNF128 (Q8TEB7) SP+PP+ECD
MGPPPGAGVSCRGGCGFSRLLAWCFLLALSPQAPGSRGAEAVWTAYLNVSWRVPHTGVNRTVWELSEEGVYGQDSPLEPVAGVLVPPDGPGALNACNPHTNFTVPTVWGSTVQVSWLALIQRGGGCTFADKIHLAYERGASGAVIFNFPGTRNEVIPMSHPGAVDIVAIMIGNLKGTKILQSIQRGIQVTMVIEVGKKHGPWVNHYS

SEQ ID NO: 2944 - protein, 182 aa, synthetic construct
  REGION 1..182: note = RNF13 (O43567) SP+PP+ECD
MLLSIGMLMLSATQVYTILTVQLFAFLNLLPVEADILAYNFENASQTFDDLPARFGYRLPAEGLKGFLINSKPENACEPIVPPPVKDNSSGTFIVLIRRLDCNFDIKVLNAQRAGYKAAIVHNVDSDDLISMGSNDIEVLKKIDIPSVFIGESSANSLKDEFTYEKGGHLILVPEFSLPLEY

SEQ ID NO: 2945 - protein, 194 aa, synthetic construct
  REGION 1..194: note = RNF130 (Q86XS8) SP+PP+ECD
MSCAGRAGPARLAALALLTCSLWPARADNASQEYYTALINVTVQEPGRGAPLTFRIDRGRYGLDSPKAEVRGQVLAPLPLHGVADHLGCDPQTRFFVPPNIKQWIALLQRGNCTFKEKISRAAFHNAVAVVIYNNKSKEEPVTMTHPGTGDIIAVMITELRGKDILSYLEKNISVQMTIAVGTRMPPKNFSRGS

SEQ ID NO: 2946 - protein, 200 aa, synthetic construct
  REGION 1..200: note = RNF149 (Q8NC42) SP+PP+ECD
MAWRRREASVGARGVLALALLALALCVPGARGRALEWFSAVVNIEYVDPQTNLTVWSVSESGRFGDSSPKEGAHGLVGVPWAPGGDLEGCAPDTRFFVPEPGGRGAAPWVALVARGGCTFKDKVLVAARRNASAVVLYNEERYGNITLPMSHAGTGNIVVIMISYPKGREILELVQKGIPVTMTIGVGTRHVQEFISGQS

SEQ ID NO: 2947 - protein, 208 aa, synthetic construct
  REGION 1..208: note = RNF150 (Q9ULK6) SP+PP+ECD
MAMSLIQACCSLALSTWLLSFCFVHLLCLDFTVAEKEEWYTAFVNITYAEPAPDPGAGAAGGGGAELHTEKTECGRYGEHSPKQDARGEVVMASSAHDRLACDPNTKFAAPTRGKNWIALIPKGNCTYRDKIRNAFLQNASAVVIFNVGSNTNETITMPHAGVEDIVAIMIPEPKGKEIVSLLERNITVTMYITIGTRNLQKYVSRTS

SEQ ID NO: 2948 - protein, 173 aa, synthetic construct
  REGION 1..173: note = RNF167 (Q9H6Y7) SP+PP+ECD
MHPAAFPLPVVVAAVLWGAAPTRGLIRATSDHNASMDFADLPALFGATLSQEGLQGFLVEAHPDNACSPIAPPPPAPVNGSVFIALLRRFDCNFDLKVLNAQKAGYGAAVVHNVNSNELLNMVWNSEEIQQQIWIPSVFIGERSSEYLRALFVYEKGARVLLVPDNTFPLGYY

SEQ ID NO: 2949 - protein, 197 aa, synthetic construct
  REGION 1..197: note = RNF43 (Q68DV7) SP+PP+ECD
MSGGHQLQLAALWPWLLMATLQAGFGRTGLVLAAAVESERSAEQKAIIRVIPLKMDPTGKLNLTLEGVFAGVAEITPAEGKLMQSHPLYLCNASDDDNLEPGFISIVKLESPRRAPRPCLSLASKARMAGERGASAVLFDITEDRAAAEQLQQPLGLTWPVVLIWGNDAEKLMEFVYKNQKAHVRIELKEPPAWPDY

SEQ ID NO: 2950 - protein, 897 aa, synthetic construct
  REGION 1..897: note = ROBO1 (Q9Y6N7) SP+PP+ECD
MKWKHVPFLVMISLLSLSPNHLFLAQLIPDPEDVERGNDHGTPIPTSDNDDNSLGYTGSRLRQEDFPPRIVEHPSDLIVSKGEPATLNCKAEGRPTPTIEWYKGGERVETDKDDPRSHRMLLPSGSLFFLRIVHGRKSRPDEGVYVCVARNYLGEAVSHNASLEVAILRDDFRQNPSDVMVAVGEPAVMECQPPRGHPEPTISWKKDGSPLDDKDERITIRGGKLMITYTRKSDAGKYVCVGTNMVGERESEVAELTVLERPSFVKRPSNLAVTVDDSAEFKCEARGDPVPTVRWRKDDGELPKSRYEIRDDHTLKIRKVTAGDMGSYTCVAENMVGKAEASATLTVQEPPHFVVKPRDQVVALGRTVTFQCEATGNPQPAIFWRREGSQNLLFSYQPPQSSSRFSVSQTGDLTITNVQRSDVGYYICQTLNVAGSIITKAYLEVTDVIADRPPPVIRQGPVNQTVAVDGTFVLSCVATGSPVPTILWRKDGVLVSTQDSRIKQLENGVLQIRYAKLGDTGRYTCIASTPSGEATWSAYIEVQEFGVPVQPPRPTDPNLIPSAPSKPEVTDVSRNTVTLSWQPNLNSGATPTSYIIEAFSHASGSSWQTVAENVKTETSAIKGLKPNAIYLFLVRAANAYGISDPSQISDPVKTQDVLPTSQGVDHKQVQRELGNAVLHLHNPTVLSSSSIEVHWTVDQQSQYIQGYKILYRPSGANHGESDWLVFEVRTPAKNSVVIPDLRKGVNYEIKARPFFNEFQGADSEIKFAKTLEEAPSAPPQGVTVSKNDGNGTAILVSWQPPPEDTQNGMVQEYKVWCLGNETRYHINKTVDGSTFSVVIPFLVPGIRYSVEVAASTGAGSGVKSEPQFIQLDAHGNPVSPEDQVSLAQQISDVVKQP

SEQ ID NO: 2951 - protein, 859 aa, synthetic construct
  REGION 1..859: note = ROBO2 (Q9HCK4) SP+PP+ECD
MSLLMFTQLLLCGFLYVRVDGSRLRQEDFPPRIVEHPSDVIVSKGEPTTLNCKAEGRPTPTIEWYKDGERVETDKDDPRSHRMLLPSGSLFFLRIVHGRRSKPDEGSYVCVARNYLGEAVSRNASLEVALLRDDFRQNPTDVVVAAGEPAILECQPPRGHPEPTIYWKKDKVRIDDKEERISIRGGKLMISNTRKSDAGMYTCVGTNMVGERDSDPAELTVFERPTFLRRPINQVVLEEEAVEFRCQVQGDPQPTVRWKKDDADLPRGRYDIKDDYTLRIKKTMSTDEGTYMCIAENRVGKMEASATLTVRAPPQFVVRPRDQIVAQGRTVTFPCETKGNPQPAVFWQKEGSQNLLFPNQPQQPNSRCSVSPTGDLTITNIQRSDAGYYICQALTVAGSILAKAQLEVTDVLTDRPPPIILQGPANQTLAVDGTALLKCKATGDPLPVISWLKEGFTFPGRDPRATIQEQGTLQIKNLRISDTGTYTCVATSSSGETSWSAVLDVTESGATISKNYDLSDLPGPPSKPQVTDVTKNSVTLSWQPGTPGTLPASAYIIEAFSQSVSNSWQTVANHVKTTLYTVRGLRPNTIYLFMVRAINPQGLSDPSPMSDPVRTQDISPPAQGVDHRQVQKELGDVLVRLHNPVVLTPTTVQVTWTVDRQPQFIQGYRVMYRQTSGLQATSSWQNLDAKVPTERSAVLVNLKKGVTYEIKVRPYFNEFQGMDSESKTVRTTEEAPSAPPQSVTVLTVGSYNSTSISVSWDPPPPDHQNGIIQEYKIWCLGNETRFHINKTVDAAIRSVIIGGLFPGIQYRVEVAASTSAGVGVKSEPQPIIIGRRNEVVITENNNSITEQITDVVKQP

SEQ ID NO: 2952 - protein, 891 aa, synthetic construct
  REGION 1..891: note = ROBO3 (Q96MS0) SP+PP+ECD
MLRYLLKTLLQMNLFADSLAGDISNSSELLLGFNSSLAALNHTLLPPGDPSLNGSRVGPEDAMPRIVEQPPDLLVSRGEPATLPCRAEGRPRPNIEWYKNGARVATVREDPRAHRLLLPSGALFFPRIVHGRRARPDEGVYTCVARNYLGAAASRNASLEVAVLRDDFRQSPGNVVVAVGEPAVLECVPPRGHPEPSVSWRKDGARLKEEEGRITIRGGKLMMSHTLKSDAGMYVCVASNMAGERESAAAEVMVLERPSFLRRPVNQVVLADAPVTFLCEVKGDPPPRLRWRKEDGELPTGRYEIRSDHSLWIGHVSAEDEGTYTCVAENSVGRAEASGSLSVHVPPQLVTQPQDQMAAPGESVAFQCETKGNPPPAIFWQKEGSQVLLFPSQSLQPTGRFSVSPRGQLNITAVQRGDAGYYVCQAVSVAGSILAKALLEIKGASLDGLPPVILQGPANQTLVLGSSVWLPCRVTGNPQPSVRWKKDGQWLQGDDLQFKTMANGTLYIANVQEMDMGFYSCVAKSSTGEATWSGWLKMREDWGVSPDPPTEPSSPPGAPSQPVVTEITKNSITLTWKPNPQTGAAVTSYVIEAFSPAAGNTWRTVADGVQLETHTVSGLQPNTIYLFLVRAVGAWGLSEPSPVSEPVRTQDSSPSRPVEDPWRGQQGLAEVAVRLQEPIVLGPRTLQVSWTVDGPVQLVQGFRVSWRVAGPEGGSWTMLDLQSPSQQSTVLRGLPPGTQIQIKVQAQGQEGLGAESLSVTRSIPEEAPSGPPQGVAVALGGDGNSSITVSWEPPLPSQQNGVITEYQIWCLGNESRFHLNRSAAGWARSAMLRGLVPGLLYRTLVAAATSAGVGVPSAPVLVQLPSPPDLEPGLEVGAGLAVRLARVLREP

SEQ ID NO: 2953 - protein, 406 aa, synthetic construct
  REGION 1..406: note = ROR1 (Q01973) SP+PP+ECD
MHRPRRRGTRPPLLALLAALLLAARGAAAQETELSVSAELVPTSSWNISSELNKDSYLTLDEPMNNITTSLGQTAELHCKVSGNPPPTIRWFKNDAPVVQEPRRLSFRSTIYGSRLRIRNLDTTDTGYFQCVATNGKEVVSSTGVLFVKFGPPPTASPGYSDEYEEDGFCQPYRGIACARFIGNRTVYMESLHMQGEIENQITAAFTMIGTSSHLSDKCSQFAIPSLCHYAFPYCDETSSVPKPRDLCRDECEILENVLCQTEYIFARSNPMILMRLKLPNCEDLPQPESPEAANCIRIGIPMADPINKNHKCYNSTGVDYRGTVSVTKSGRQCQPWNSQYPHTHTFTALRFPELNGGHSYCRNPGNQKEAPWCFTLDENFKSDLCDIPACDSKDSKEKNKMEILY

SEQ ID NO: 2954 - protein, 403 aa, synthetic construct
  REGION 1..403: note = ROR2 (Q01974) SP+PP+ECD
MARGSALPRRPLLCIPAVWAAAALLLSVSRTSGEVEVLDPNDPLGPLDGQDGPIPTLKGYFLNFLEPVNNITIVQGQTAILHCKVAGNPPPNVRWLKNDAPVVQEPRRIIIRKTEYGSRLRIQDLDTTDTGYYQCVATNGMKTITATGVLFVRLGPTHSPNHNFQDDYHEDGFCQPYRGIACARFIGNRTIYVDSLQMQGEIENRITAAFTMIGTSTHLSDQCSQFAIPSFCHFVFPLCDARSRTPKPRELCRDECEVLESDLCRQEYTIARSNPLILMRLQLPKCEALPMPESPDAANCMRIGIPAERLGRYHQCYNGSGMDYRGTASTTKSGHQCQPWALQHPHSHHLSSTDFPELGGGHAYCRNPGGQMEGPWCFTQNKNVRMELCDVPSCSPRDSSKMG

SEQ ID NO: 2955 - protein, 1859 aa, synthetic construct
  REGION 1..1859: note = ROS1 (P08922) SP+PP+ECD
MKNIYCLIPKLVNFATLGCLWISVVQCTVLNSCLKSCVTNLGQQLDLGTPHNLSEPCIQGCHFWNSVDQKNCALKCRESCEVGCSSAEGAYEEEVLENADLPTAPFASSIGSHNMTLRWKSANFSGVKYIIQWKYAQLLGSWTYTKTVSRPSYVVKPLHPFTEYIFRVVWIFTAQLQLYSPPSPSYRTHPHGVPETAPLIRNIESSSPDTVEVSWDPPQFPGGPILGYNLRLISKNQKLDAGTQRTSFQFYSTLPNTIYRFSIAAVNEVGEGPEAESSITTSSSAVQQEEQWLFLSRKTSLRKRSLKHLVDEAHCLRLDAIYHNITGISVDVHQQIVYFSEGTLIWAKKAANMSDVSDLRIFYRGSGLISSISIDWLYQRMYFIMDELVCVCDLENCSNIEEITPPSISAPQKIVADSYNGYVFYLLRDGIYRADLPVPSGRCAEAVRIVESCTLKDFAIKPQAKRIIYFNDTAQVFMSTFLDGSASHLILPRIPFADVKSFACENNDFLVTDGKVIFQQDALSFNEFIVGCDLSHIEEFGFGNLVIFGSSSQLHPLPGRPQELSVLFGSHQALVQWKPPALAIGANVILISDIIELFELGPSAWQNWTYEVKVSTQDPPEVTHIFLNISGTMLNVPELQSAMKYKVSVRASSPKRPGPWSEPSVGTTLVPASEPPFIMAVKEDGLWSKPLNSFGPGEFLSSDIGNVSDMDWYNNSLYYSDTKGDVFVWLLNGTDISENYHLPSIAGAGALAFEWLGHFLYWAGKTYVIQRQSVLTGHTDIVTHVKLLVNDMVVDSVGGYLYWTTLYSVESTRLNGESSLVLQTQPWFSGKKVIALTLDLSDGLLYWLVQDSQCIHLYTAVLRGQSTGDTTITEFAAWSTSEISQNALMYYSGRLFWINGFRIITTQEIGQKTSVSVLEPARFNQFTIIQTSLKPLPGNFSFTPKVIPDSVQESSFRIEGNASSFQILWNGPPAVDWGVVFYSVEFSAHSKFLASEQHSLPVFTVEGLEPYALFNLSVTPYTYWGKGPKTSLSLRAPETVPSAPENPRIFILPSGKCCNKNEVVVEFRWNKPKHENGVLTKFEIFYNISNQSITNKTCEDWIAVNVTPSVMSFQLEGMSPRCFIAFQVRAFTSKGPGPYADVVKSTTSEINPFPHLITLLGNKIVFLDMDQNQVVWTFSAERVISAVCYTADNEMGYYAEGDSLFLLHLHNRSSSELFQDSLVFDITVITIDWISRHLYFALKESQNGMQVFDVDLEHKVKYPREVKIHNRNSTIISFSVYPLLSRLYWTEVSNFGYQMFYYSIISHTLHRILQPTATNQQNKRNQCSCNVTEFELSGAMAIDTSNLEKPLIYFAKAQEIWAMDLEGCQCWRVITVPAMLAGKTLVSLTVDGDLIYWIITAKDSTQIYQAKKGNGAIVSQVKALRSRHILAYSSVMQPFPDKAFLSLASDTVEPTILNATNTSLTIRLPLAKTNLTWYGITSPTPTYLVYYAEVNDRKNSSDLKYRILEFQDSIALIEDLQPFSTYMIQIAVKNYYSDPLEHLPPGKEIWGKTKNGVPEAVQLINTTVRSDTSLIISWRESHKPNGPKESVRYQLAISHLALIPETPLRQSEFPNGRLTLLVTRLSGGNIYVLKVLACHSEEMWCTESHPVTVEMFNTPEKPYSLVPENTSLQFNWKAPLNVNLIRFWVELQKWKYNEFYHVKTSCSQGPAYVCNITNLQPYTSYNVRVVVVYKTGENSTSLPESFKTKAGVPNKPGIPKLLEGSKNSIQWEKAEDNGCRITYYILEIRKSTSNNLQNQNLRWKMTFNGSCSSVCTWKSKNLKGIFQFRVVAANNLGFGEYSGISENIILVGDDFWIPE

SEQ ID NO: 2956 - protein, 438 aa, synthetic construct
  REGION 1..438: note = RPN1 (P04843) SP+PP+ECD
MEAPAAGLFLLLLLGTWAPAPGSASSEAPPLINEDVKRTVDLSSHLAKVTAEVVLAHLGGGSTSRATSFLLALEPELEARLAHLGVQVKGEDEEENNLEVRETKIKGKSGRFFTVKLPVALDPGAKISVIVETVYTHVLHPYPTQITQSEKQFVVFEGNHYFYSPYPTKTQTMRVKLASRNVESYTKLGNPTRSEDLLDYGPFRDVPAYSQDTFKVHYENNSPFLTITSMTRVIEVSHWGNIAVEENVDLKHTGAVLKGPFSRYDYQRQPDSGISSIRSFKTILPAAAQDVYYRDEIGNVSTSHLLILDDSVEMEIRPRFPLFGGWKTHYIVGYNLPSYEYLYNLGDQYALKMRFVDHVFDEQVIDSLTVKIILPEGAKNIEIDSPYEISRAPDELHYTYLDTFGRPVIVAYKKNLVEQHIQDIVVHYTFNKVLMLQE

SEQ ID NO: 2957 - protein, 227 aa, synthetic construct
  REGION 1..227: note = RYK (P34925) SP+PP+ECD
MRGAARLGRPGRSCLPGARGLRAPPPPPLLLLLALLPLLPAPGAAAAPAPRPPELQSASAGPSVSLYLSEDEVRRLIGLDAELYYVRNDLISHYALSFSLLVPSETNFLHFTWHAKSKVEYKLGFQVDNVLAMDMPQVNISVQGEVPRTLSVFRVELSCTGKVDSEVMILMQLNLTVNSSKNFTVLNFKRRKMCYKKLEEVKTSALDKNTSRTIYDPVHAAPTTSTR

SEQ ID NO: 2958 - protein, 421 aa, synthetic construct
  REGION 1..421: note = SCARF1 (Q14162) SP+PP+ECD
MGLGLLLPLLLLWTRGTQGSELDPKGQHVCVASSPSAELQCCAGWRQKDQECTIPICEGPDACQKDEVCVKPGLCRCKPGFFGAHCSSRCPGQYWGPDCRESCPCHPHGQCEPATGACQCQADRWGARCEFPCACGPHGRCDPATGVCHCEPGWWSSTCRRPCQCNTAAARCEQATGACVCKPGWWGRRCSFRCNCHGSPCEQDSGRCACRPGWWGPECQQQCECVRGRCSAASGECTCPPGFRGARCELPCPAGSHGVQCAHSCGRCKHNEPCSPDTGSCESCEPGWNGTQCQQPCLPGTFGESCEQQCPHCRHGEACEPDTGHCQRCDPGWLGPRCEDPCPTGTFGEDCGSTCPTCVQGSCDTVTGDCVCSAGYWGPSCNASCPAGFHGNNCSVPCECPEGLCHPVSGSCQPGSGSRDT

SEQ ID NO: 2959 - protein, 441 aa, synthetic construct
  REGION 1..441: note = SCARF2 (Q96GP6) SP+PP+ECD
MEGAGPRGAGPARRRGAGGPPSPLLPSLLLLLLLWMLPDTVAPQELNPRGRNVCRAPGSQVPTCCAGWRQQGDECGIAVCEGNSTCSENEVCVRPGECRCRHGYFGANCDTKCPRQFWGPDCKELCSCHPHGQCEDVTGQCTCHARRWGARCEHACQCQHGTCHPRSGACRCEPGWWGAQCASACYCSATSRCDPQTGACLCHAGWWGRSCNNQCACNSSPCEQQSGRCQCRERTFGARCDRYCQCFRGRCHPVDGTCACEPGYRGKYCREPCPAGFYGLGCRRRCGQCKGQQPCTVAEGRCLTCEPGWNGTKCDQPCATGFYGEGCSHRCPPCRDGHACNHVTGKCTRCNAGWIGDRCETKCSNGTYGEDCAFVCADCGSGHCDFQSGRCLCSPGVHGPHCNVTCPPGLHGADCAQACSCHEDTCDPVTGACHLETNQRK

SEQ ID NO: 2960 - protein, 906 aa, synthetic construct
  REGION 1..906: note = SCART1 (Q4G0T1) SP+PP+ECD
MRAALWTLGLGPLLLNLWAVPIGGPGALRLAYRHSTCDGVVLVRHHGAWGYVCNQEWTLAEASVVCRQLGCGPAVGAPKYVPLPGEMAQPWLHNVSCRGNESSLWECSLGSWCQSPCPHAWVVVALCSNGTFRELRLVKGRSPCAGLPEIRNVNGVDRLCVLHVEEAMVFCRELGCGPVLQAPRRDVGVVRKYLACRGTEPTIRSCRLDNNFRSGCDLRLDAEVVCSGHTEARLVGGEHPCAGRLEVTWGTVCDAALDLATAHVVCRELQCGAVVSTPEGARFGRGSGPVWTEAFRCAGNESLLFHCPRGRGSQCGHGHDAGLRCSEFRMVNGSSSCEGRVEFQVQGSWAPLCATHWDIADATVLCHQLNCGNAVAAPGGGHFGDGDAAIWPDAFHCEGTESYLWNCPVSTLGAPACAPGNTASAVCSGLAHALRLREGQSRCDGRVEVSLDGVWGRVLDDAWDLRGAGVVCRQLGCRGAQQAYDAPAPSRGSVQVALSRVRCLGTETRLTQCNVSATLQEPAGTSRDAGVVCSGEVGTASPMARRHGIPGALTLSLHREPQGAAGRGAGALHGGAWGTVCDDAWDLRDAHVVCRQLGCGRALSALGAAHFGAGAGRIWLDELGCQGHESALWQCPSAGWGRHDWRHKEDAGVFCSESVALRLRGGTCCCAGWLDVFYNGTWGAMCSNALKDLSLSIICKQLGCGVWGVGLAGEQALPLCGHRDRLGGQHRVPQAAQLHSVAMPFPPMAPALLRPSRAGLSEDRPQAAGEPLNCSSWLGCPEEGALRVRGGEDRCSGRVELWHAGSWGTVCDDGWDLADAEVVCRQLGCGRAVAALGAAAFGPGSGPVWLDEVGCRGSEASLWGCPAERWGRGDRAHEEDAGVRCWEPGPGPPLPAAPFRTFWVVS

SEQ ID NO: 2961 - protein, 160 aa, synthetic construct
  REGION 1..160: note = SCN1B (Q07699) SP+PP+ECD
MGRLLALVVGAALVSSACGGCVEVDSETEAVYGMTFKILCISCKRRSETNAETFTEWTFRQKGTEEFVKILRYENEVLQLEEDERFEGRVVWNGSRGTKDLQDLSIFITNVTYNHSGDYECHVYRLLFFENYEHNTSVVKKIHIEVVDKANRDMASIVSE

SEQ ID NO: 2962 - protein, 159 aa, synthetic construct
  REGION 1..159: note = SCN2B (O60939) SP+PP+ECD
MHRDAWLPRPAFSLTGLSLFFSLVPPGRSMEVTVPATLNVLNGSDARLPCTFNSCYTVNHKQFSLNWTYQECNNCSEEMFLQFRMKIINLKLERFQDRVEFSGNPSKYDVSVMLRNVQPEDEGIYNCYIMNPPDRHRGHGKIHLQVLMEEPPERDSTVA

SEQ ID NO: 2963 - protein, 159 aa, synthetic construct
  REGION 1..159: note = SCN3B (Q9NY72) SP+PP+ECD
MPAFNRLFPLASLVLIYWVSVCFPVCVEVPSETEAVQGNPMKLRCISCMKREEVEATTVVEWFYRPEGGKDFLIYEYRNGHQEVESPFQGRLQWNGSKDLQDVSITVLNVTLNDSGLYTCNVSREFEFEAHRPFVKTTRLIPLRVTEEAGEDFTSVVSE

SEQ ID NO: 2964 - protein, 162 aa, synthetic construct
  REGION 1..162: note = SCN4B (Q8IWT1) SP+PP+ECD
MPGAGDGGKAPARWLGTGLLGLFLLPVTLSLEVSVGKATDIYAVNGTEILLPCTFSSCFGFEDLHFRWTYNSSDAFKILIEGTVKNEKSDPKVTLKDDDRITLVGSTKEKMNNISIVLRDLEFSDTGKYTCHVKNPKENNLQHHATIFLQVVDRLEEVDNTV

SEQ ID NO: 2965 - protein, 254 aa, synthetic construct
  REGION 1..254: note = SDC1 (P18827) SP+PP+ECD
MRRAALWLWLCALALSLQPALPQIVATNLPPEDQDGSGDDSDNFSGSGAGALQDITLSQQTPSTWKDTQLLTAIPTSPEPTGLEATAASTSTLPAGEGPKEGEAVVLPEVEPGLTAREQEATPRPRETTQLPTTHLASTTTATTAQEPATSHPHRDMQPGHHETSTPAGPSQADLHTPHTEDGGPSATERAAEDGASSQLPAAEGSGEQDFTFETSGENTAVVAVEPDRRNQSPVDQGATGASQGLLDRKEVLG

SEQ ID NO: 2966 - protein, 144 aa, synthetic construct
  REGION 1..144: note = SDC2 (P34741) SP+PP+ECD
MRRAWILLTLGLVACVSAESRAELTSDKDMYLDNSSIEEASGVYPIDDDDYASASGSGADEDVESPELTTSRPLPKILLTSAAPKVETTTLNIQNKIPAQTKSPEETDKEKVHLSDSERKMDPAEEDTNVYTEKHSDSLFKRTE

SEQ ID NO: 2967 - protein, 1932 aa, synthetic construct
  REGION 1..1932: note = SDK2 (Q58EX2) SP+PP+ECD
MWGLLIWTLLALHQIRAARAQDDVSPYFKTEPVRTQVHLEGNRLVLTCMAEGSWPLEFKWLHNNRELTKFSLEYRYMITSLDRTHAGFYRCIVRNRMGALLQRQTEVQVAYMGSFEEGEKHQSVSHGEAAVIRAPRIASFPQPQVTWFRDGRKIPPSSRIAITLENTLVILSTVAPDAGRYYVQAVNDKNGDNKTSQPITLTVENVGGPADPIAPTIIIPPKNTSVVAGTSEVTLECVANARPLIKLHIIWKKDGVLLSGGISDHNRRLTIPNPTGSDAGYYECEAVLRSSSVPSVVRGAYLSVLEPPQFVKEPERHITAEMEKVVDIPCQAKGVPPPSITWYKDAAVVEVEKLTRFRQRNDGGLQISGLVPDDTGMFQCFARNAAGEVQTSTYLAVTSIAPNITRGPLDSTVIDGMSVVLACETSGAPRPAITWQKGERILASGSVQLPRFTPLESGSLLISPTHISDAGTYTCLATNSRGVDEASADLVVWARTRITKPPQDQSVIKGTQASMVCGVTHDPRVTIRYIWEKDGATLGTESHPRIRLDRNGSLHISQTWSGDIGTYTCRVISAGGNDSRSAHLRVRQLPHAPEHPVATLSTVERRAINLTWTKPFDGNSPLIRYILEMSENNAPWTVLLASVDPKATSVTVKGLVPARSYQFRLCAVNDVGKGQFSKDTERVSLPEEPPTAPPQNVIASGRTNQSIMIQWQPPPESHQNGILKGYIIRYCLAGLPVGYQFKNITDADVNNLLLEDLIIWTNYEIEVAAYNSAGLGVYSSKVTEWTLQGVPTVPPGNVHAEATNSTTIRFTWNAPSPQFINGINQGYKLIAWEPEQEEEVTMVTARPNFQDSIHVGFVSGLKKFTEYFTSVLCFTTPGDGPRSTPQLVRTHEDVPGPVGHLSFSEILDTSLKVSWQEPGEKNGILTGYRISWEEYNRTNTRVTHYLPNVTLEYRVTGLTALTTYTIEVAAMTSKGQGQVSASTISSGVPPELPGPPTNLGISNIGPRSVTLQFRPGYDGKTSISRWLVEAQVGVVGEGEEWLLIHQLSNEPDARSMEVPDLNPFTCYSFRMRQVNIVGTSPPSQPSRKIQTLQAPPDMAPANVSLRTASETSLWLRWMPLPEMEYNGNPESVGYKIKYSRSDGHGKTLSHVVQDRVERDYTIEDLEEWTEYRVQVQAFNAIGSGPWSQTVVGRTRESVPSSGPTNVSALATTSSSMLVRWSEVPEADRNGLVLGYKVMYKEKDSDTQPRFWLVEGNSSRSAQLTGLGKYVLYEVQVLAFTRIGDGSPSHPPILERTLDDVPGPPMGILFPEVRTTSVRLIWQPPAAPNGIILAYQITHRLNTTTANTATVEVLAPSARQYTATGLKPESVYLFRITAQTRKGWGEAAEALVVTTEKRDRPQPPSRPMVQQEDVRARSVLLSWEPGSDGLSPVRYYTIQTRELPSGRWALHSASVSHNASSFIVDRLKPFTSYKFRVKATNDIGDSEFSEESESLTTLQAAPDEAPTILSVTPHTTTSVLIRWQPPAEDKINGILLGFRIRYRELLYEGLRGFTLRGINNPGATWAELTSMYSMRNLSRPSLTQYELDNLNKHRRYEIRMSVYNAVGEGPSSPPQEVFVGEAVPTAAPRNVVVHGATATQLDVTWEPPPLDSQNGDIQGYKIYFWEAQRGNLTERVKTLFLAENSVKLKNLTGYTAYMVSVAAFNAAGDGPRSTPTQGQTQQAAPSAPSSVKFSELTTTSVNVSWEAPQFPNGILEGYRLVYEPCSPVDGVSKIVTVDVKGNSPLWLKVKDLAEGVTYRFRIRAKTFTYGPEIEANVTTGPGEGAPGPPGVPIIVRYSSAIAIHWSSGDPGKGPITRYVIEARPSDEGLWDILIKDIPKEVSSYTFSMDILKPGVSYDFRVIAVNDYGFGTPSSPSQSVPAQKANPFYEEWWF

SEQ ID NO: 2968 - protein, 145 aa, synthetic construct
  REGION 1..145: note = SECTM1 (Q8WVN6) SP+PP+ECD
MQTCPLAFPGHVSQALGTLLFLAASLSAQNEGWDSPICTEGVVSVSWGENTVMSCNISNAFSHVNIKLRAHGQESAIFNEVAPGYFSRDGWQLQVQGGVAQLVIKGARDSHAGLYMWHLVGHQRNNRQVTLEVSGAEPQSAPDTG

SEQ ID NO: 2969 - protein, 556 aa, synthetic construct
  REGION 1..556: note = SELE (P16581) SP+PP+ECD
MIASQFLSALTLVLLIKESGAWSYNTSTEAMTYDEASAYCQQRYTHLVAIQNKEEIEYLNSILSYSPSYYWIGIRKVNNVWVWVGTQKPLTEEAKNWAPGEPNNRQKDEDCVEIYIKREKDVGMWNDERCSKKKLALCYTAACTNTSCSGHGECVETINNYTCKCDPGFSGLKCEQIVNCTALESPEHGSLVCSHPLGNFSYNSSCSISCDRGYLPSSMETMQCMSSGEWSAPIPACNVVECDAVTNPANGFVECFQNPGSFPWNTTCTFDCEEGFELMGAQSLQCTSSGNWDNEKPTCKAVTCRAVRQPQNGSVRCSHSPAGEFTFKSSCNFTCEEGFMLQGPAQVECTTQGQWTQQIPVCEAFQCTALSNPERGYMNCLPSASGSFRYGSSCEFSCEQGFVLKGSKRLQCGPTGEWDNEKPTCEAVRCDAVHQPPKGLVRCAHSPIGEFTYKSSCAFSCEEGFELHGSTQLECTSQGQWTEEVPSCQVVKCSSLAVPGKINMSCSGEPVFGTVCKFACPEGWTLNGSAARTCGATGHWSGLLPTCEAPTESNIP

SEQ ID NO: 2970 - protein, 332 aa, synthetic construct
  REGION 1..332: note = SELL (P14151) SP+PP+ECD
MIFPWKCQSTQRDLWNIFKLWGWTMLCCDFLAHHGTDCWTYHYSEKPMNWQRARRFCRDNYTDLVAIQNKAEIEYLEKTLPFSRSYYWIGIRKIGGIWTWVGTNKSLTEEAENWGDGEPNNKKNKEDCVEIYIKRNKDAGKWNDDACHKLKAALCYTASCQPWSCSGHGECVEIINNYTCNCDVGYYGPQCQFVIQCEPLEAPELGTMDCTHPLGNFSFSSQCAFSCSEGTNLTGIEETTCGPFGNWSSPEPTCQVIQCEPLSAPDLGIMNCSHPLASFSFTSACTFICSEGTELIGKKKTICESSGIWSNPSPICQKLDKSFSMIKEGDYN

SEQ ID NO: 2971 - protein, 771 aa, synthetic construct
  REGION 1..771: note = SELP (P16109) SP+PP+ECD
MANCQIAILYQRFQRVVFGISQLLCFSALISELTNQKEVAAWTYHYSTKAYSWNISRKYCQNRYTDLVAIQNKNEIDYLNKVLPYYSSYYWIGIRKNNKTWTWVGTKKALTNEAENWADNEPNNKRNNEDCVEIYIKSPSAPGKWNDEHCLKKKHALCYTASCQDMSCSKQGECLETIGNYTCSCYPGFYGPECEYVRECGELELPQHVLMNCSHPLGNFSFNSQCSFHCTDGYQVNGPSKLECLASGIWTNKPPQCLAAQCPPLKIPERGNMTCLHSAKAFQHQSSCSFSCEEGFALVGPEVVQCTASGVWTAPAPVCKAVQCQHLEAPSEGTMDCVHPLTAFAYGSSCKFECQPGYRVRGLDMLRCIDSGHWSAPLPTCEAISCEPLESPVHGSMDCSPSLRAFQYDTNCSFRCAEGFMLRGADIVRCDNLGQWTAPAPVCQALQCQDLPVPNEARVNCSHPFGAFRYQSVCSFTCNEGLLLVGASVLQCLATGNWNSVPPECQAIPCTPLLSPQNGTMTCVQPLGSSSYKSTCQFICDEGYSLSGPERLDCTRSGRWTDSPPMCEAIKCPELFAPEQGSLDCSDTRGEFNVGSTCHFSCDNGFKLEGPNNVECTTSGRWSATPPTCKGIASLPTPGLQCPALTTPGQGTMYCRHHPGTFGFNTTCYFGCNAGFTLIGDSTLSCRPSGQWTAVTPACRAVKCSELHVNKPIAMNCSNLWGNFSYGSICSFHCLEGQLLNGSAQTACQENGHWSTTVPTCQAGPLTIQEA

SEQ ID NO: 2972 - protein, 320 aa, synthetic construct
  REGION 1..320: note = SELPLG (Q14242) SP+PP+ECD
MPLQLLLLLILLGPGNSLQLWDTWADEAEKALGPLLARDRRQATEYEYLDYDFLPETEPPEMLRNSTDTTPLTGPGTPESTTVEPAARRSTGLDAGGAVTELTTELANMGNLSTDSAAMEIQTTQPAATEAQTTQPVPTEAQTTPLAATEAQTTRLTATEAQTTPLAATEAQTTPPAATEAQTTQPTGLEAQTTAPAAMEAQTTAPAAMEAQTTPPAAMEAQTTQTTAMEAQTTAPEATEAQTTQPTATEAQTTPLAAMEALSTEPSATEALSMEPTTKRGLFIPFSVSSVTHKGIPMAASNLSVNYPVGAPDHISVKQC

SEQ ID NO: 2973 - protein, 683 aa, synthetic construct
  REGION 1..683: note = SEMA4A (Q9H3S1) SP+PP+ECD
MALPALGLDPWSLLGLFLFQLLQLLLPTTTAGGGGQGPMPRVRYYAGDERRALSFFHQKGLQDFDTLLLSGDGNTLYVGAREAILALDIQDPGVPRLKNMIPWPASDRKKSECAFKKKSNETQCFNFIRVLVSYNVTHLYTCGTFAFSPACTFIELQDSYLLPISEDKVMEGKGQSPFDPAHKHTAVLVDGMLYSGTMNNFLGSEPILMRTLGSQPVLKTDNFLRWLHHDASFVAAIPSTQVVYFFFEETASEFDFFERLHTSRVARVCKNDVGGEKLLQKKWTTFLKAQLLCTQPGQLPFNVIRHAVLLPADSPTAPHIYAVFTSQWQVGGTRSSAVCAFSLLDIERVFKGKYKELNKETSRWTTYRGPETNPRPGSCSVGPSSDKALTFMKDHFLMDEQVVGTPLLVKSGVEYTRLAVETAQGLDGHSHLVMYLGTTTGSLHKAVVSGDSSAHLVEEIQLFPDPEPVRNLQLAPTQGAVFVGFSGGVWRVPRANCSVYESCVDCVLARDPHCAWDPESRTCCLLSAPNLNSWKQDMERGNPEWACASGPMSRSLRPQSRPQIIKEVLAVPNSILELPCPHLSALASYYWSHGPAAVPEASSTVYNGSLLLIVQDGVGGLYQCWATENGFSYPVISYWVDSQDQTLALDPELAGIPREHVKVPLTRVSGGAALAAQQSYWPH

SEQ ID NO: 2974 - protein, 717 aa, synthetic construct
  REGION 1..717: note = SEMA4B (Q9NPR2) SP+PP+ECD
MLRTAMGLRSWLAAPWGALPPRPPLLLLLLLLLLLQPPPPTWALSPRISLPLGSEERPFLRFEAEHISNYTALLLSRDGRTLYVGAREALFALSSNLSFLPGGEYQELLWGADAEKKQQCSFKGKDPQRDCQNYIKILLPLSGSHLFTCGTAAFSPMCTYINMENFTLARDEKGNVLLEDGKGRCPFDPNFKSTALVVDGELYTGTVSSFQGNDPAISRSQSLRPTKTESSLNWLQDPAFVASAYIPESLGSLQGDDDKIYFFFSETGQEFEFFENTIVSRIARICKGDEGGERVLQQRWTSFLKAQLLCSRPDDGFPFNVLQDVFTLSPSPQDWRDTLFYGVFTSQWHRGTTEGSAVCVFTMKDVQRVFSGLYKEVNRETQQWYTVTHPVPTPRPGACITNSARERKINSSLQLPDRVLNFLKDHFLMDGQVRSRMLLLQPQARYQRVAVHRVPGLHHTYDVLFLGTGDGRLHKAVSVGPRVHIIEELQIFSSGQPVQNLLLDTHRGLLYAASHSGVVQVPMANCSLYRSCGDCLLARDPYCAWSGSSCKHVSLYQPQLATRPWIQDIEGASAKDLCSASSVVSPSFVPTGEKPCEQVQFQPNTVNTLACPLLSNLATRLWLRNGAPVNASASCHVLPTGDLLLVGTQQLGEFQCWSLEEGFQQLVASYCPEVVEDGVADQTDEGGSVPVIISTSRVSAPAGGKASWGADRSYWKE

SEQ ID NO: 2975 - protein, 663 aa, synthetic construct
  REGION 1..663: note = SEMA4C (Q9C0C4) SP+PP+ECD
MAPHWAVWLLAARLWGLGIGAEVWWNLVPRKTVSSGELATVVRRFSQTGIQDFLTLTLTEPTGLLYVGAREALFAFSMEALELQGAISWEAPVEKKTECIQKGKNNQTECFNFIRFLQPYNASHLYVCGTYAFQPKCTYVNMLTFTLEHGEFEDGKGKCPYDPAKGHAGLLVDGELYSATLNNFLGTEPIILRNMGPHHSMKTEYLAFWLNEPHFVGSAYVPESVGSFTGDDDKVYFFFRERAVESDCYAEQVVARVARVCKGDMGGARTLQRKWTTFLKARLACSAPNWQLYFNQLQAMHTLQDTSWHNTTFFGVFQAQWGDMYLSAICEYQLEEIQRVFEGPYKEYHEEAQKWDRYTDPVPSPRPGSCINNWHRRHGYTSSLELPDNILNFVKKHPLMEEQVGPRWSRPLLVKKGTNFTHLVADRVTGLDGATYTVLFIGTGDGWLLKAVSLGPWVHLIEELQLFDQEPMRSLVLSQSKKLLFAGSRSQLVQLPVADCMKYRSCADCVLARDPYCAWSVNTSRCVAVGGHSGSLLIQHVMTSDTSGICNLRGSKKVRPTPKNITVVAGTDLVLPCHLSSNLAHARWTFGGRDLPAEQPGSFLYDARLQALVVMAAQPRHAGAYHCFSEEQGARLAAEGYLVAVVAGPSVTLEARAPLENLG

SEQ ID NO: 2976 - protein, 734 aa, synthetic construct
  REGION 1..734: note = SEMA4D (Q92854) SP+PP+ECD
MRMCTPIRGLLMALAVMFGTAMAFAPIPRITWEHREVHLVQFHEPDIYNYSALLLSEDKDTLYIGAREAVFAVNALNISEKQHEVYWKVSEDKKAKCAEKGKSKQTECLNYIRVLQPLSATSLYVCGTNAFQPACDHLNLTSFKFLGKNEDGKGRCPFDPAHSYTSVMVDGELYSGTSYNFLGSEPIISRNSSHSPLRTEYAIPWLNEPSFVFADVIRKSPDSPDGEDDRVYFFFTEVSVEYEFVFRVLIPRIARVCKGDQGGLRTLQKKWTSFLKARLICSRPDSGLVFNVLRDVFVLRSPGLKVPVFYALFTPQLNNVGLSAVCAYNLSTAEEVFSHGKYMQSTTVEQSHTKWVRYNGPVPKPRPGACIDSEARAANYTSSLNLPDKTLQFVKDHPLMDDSVTPIDNRPRLIKKDVNYTQIVVDRTQALDGTVYDVMFVSTDRGALHKAISLEHAVHIIEETQLFQDFEPVQTLLLSSKKGNRFVYAGSNSGVVQAPLAFCGKHGTCEDCVLARDPYCAWSPPTATCVALHQTESPSRGLIQEMSGDASVCPDKSKGSYRQHFFKHGGTAELKCSQKSNLARVFWKFQNGVLKAESPKYGLMGRKNLLIFNLSEGDSGVYQCLSEERVKNKTVFQVVAKHVLEVKVVPKPVVAPTLSVVQTEGSRIATKVLVASTQGSSPPTPAVQATSSGAITLPPKPAPTGTSCEPKIVINTVPQLHSEKTMYLKSSDNR

SEQ ID NO: 2977 - protein, 659 aa, synthetic construct
  REGION 1..659: note = SEMA4F (O95754) SP+PP+ECD
MPASAARPRPGPGQPTASPFPLLLLAVLSGPVSGRVPRSVPRTSLPISEADSCLTRFAVPHTYNYSVLLVDPASHTLYVGARDTIFALSLPFSGERPRRIDWMVPEAHRQNCRKKGKKEDECHNFVQILAIANASHLLTCGTFAFDPKCGVIDVSRFQQVERLESGRGKCPFEPAQRSAAVMAGGVLYAATVKNYLGTEPIITRAVGRAEDWIRTDTLPSWLNAPAFVAAVALSPAEWGDEDGDDEIYFFFTETSRAFDSYERIKVPRVARVCAGDLGGRKTLQQRWTTFLKADLLCPGPEHGRASSVLQDVAVLRPELGAGTPIFYGIFSSQWEGATISAVCAFRPQDIRTVLNGPFRELKHDCNRGLPVVDNDVPQPRPGECITNNMKLRHFGSSLSLPDRVLTFIRDHPLMDRPVFPADGHPLLVTTDTAYLRVVAHRVTSLSGKEYDVLYLGTEDGHLHRAVRIGAQLSVLEDLALFPEPQPVENMKLYHSWLLVGSRTEVTQVNTTNCGRLQSCSECILAQDPVCAWSFRLDECVAHAGEHRGLVQDIESADVSSLCPKEPGERPVVFEVPVATAAHVVLPCSPSSAWASCVWHQPSGVTALTPRRDGLEVVVTPGAMGAYACECQEGGAAHVVAAYSLVWGSQRDAPSRAHTV

SEQ ID NO: 2978 - protein, 675 aa, synthetic construct
  REGION 1..675: note = SEMA4G (Q9NTN9) SP+PP+ECD
MWGRLWPLLLSILTATAVPGPSLRRPSRELDATPRMTIPYEELSGTRHFKGQAQNYSTLLLEEASARLLVGARGALFSLSANDIGDGAHKEIHWEASPEMQSKCHQKGKNNQTECFNHVRFLQRLNSTHLYACGTHAFQPLCAAIDAEAFTLPTSFEEGKEKCPYDPARGFTGLIIDGGLYTATRYEFRSIPDIRRSRHPHSLRTEETPMHWLNDAEFVFSVLVRESKASAVGDDDKVYYFFTERATEEGSGSFTQSRSSHRVARVARVCKGDLGGKKILQKKWTSFLKARLICHIPLYETLRGVCSLDAETSSRTHFYAAFTLSTQWKTLEASAICRYDLAEIQAVFAGPYMEYQDGSRRWGRYEGGVPEPRPGSCITDSLRSQGYNSSQDLPSLVLDFVKLHPLMARPVVPTRGRPLLLKRNIRYTHLTGTPVTTPAGPTYDLLFLGTADGWIHKAVVLGSGMHIIEETQVFRESQSVENLVISLLQHSLYVGAPSGVIQLPLSSCSRYRSCYDCILARDPYCGWDPGTHACAAATTIANRTALIQDIERGNRGCESSRDTGPPPPLKTRSVLRGDDVLLPCDQPSNLARALWLLNGSMGLSDGQGGYRVGVDGLLVTDAQPEHSGNYGCYAEENGLRTLLASYSLTVRPATPAPAPKAPATPGAQLAPDVRL

SEQ ID NO: 2979 - protein, 968 aa, synthetic construct
  REGION 1..968: note = SEMA5A (Q13591) SP+PP+ECD
MKGTCVIAWLFSSLGLWRLAHPEAQGTTQCQRTEHPVISYKEIGPWLREFRAKNAVDFSQLTFDPGQKELVVGARNYLFRLQLEDLSLIQAVEWECDEATKKACYSKGKSKEECQNYIRVLLVGGDRLFTCGTNAFTPVCTNRSLSNLTEIHDQISGMARCPYSPQHNSTALLTAGGELYAATAMDFPGRDPAIYRSLGILPPLRTAQYNSKWLNEPNFVSSYDIGNFTYFFFRENAVEHDCGKTVFSRAARVCKNDIGGRFLLEDTWTTFMKARLNCSRPGEVPFYYNELQSTFFLPELDLIYGIFTTNVNSIAASAVCVFNLSAIAQAFSGPFKYQENSRSAWLPYPNPNPHFQCGTVDQGLYVNLTERNLQDAQKFILMHEVVQPVTTVPSFMEDNSRFSHVAVDVVQGREALVHIIYLATDYGTIKKVRVPLNQTSSSCLLEEIELFPERRREPIRSLQILHSQSVLFVGLREHVVKIPLKRCQFYRTRSTCIGAQDPYCGWDVVMKKCTSLEESLSMTQWEQSISACPTRNLTVDGHFGVWSPWTPCTHTDGSAVGSCLCRTRSCDSPAPQCGGWQCEGPGMEIANCSRNGGWTPWTSWSPCSTTCGIGFQVRQRSCSNPTPRHGGRVCVGQNREERYCNEHLLCPPHMFWTGWGPWERCTAQCGGGIQARRRICENGPDCAGCNVEYQSCNTNPCPELKKTTPWTPWTPVNISDNGGHYEQRFRYTCKARLADPNLLEVGRQRIEMRYCSSDGTSGCSTDGLSGDFLRAGRYSAHTVNGAWSAWTSWSQCSRDCSRGIRNRKRVCNNPEPKYGGMPCLGPSLEYQECNILPCPVDGVWSCWSPWTKCSATCGGGHYMRTRSCSNPAPAYGGDICLGLHTEEALCNTQPCPESWSEWSDWSECEASGVQVRARQCILLFPMGSQCSGNTTESRPCVFDSNFIPEVSVARSSSVEEKRCGEFNM

SEQ ID NO: 2980 - protein, 649 aa, synthetic construct
  REGION 1..649: note = SEMA6A (Q9H2E6) SP+PP+ECD
MRSEALLLYFTLLHFAGAGFPEDSEPISISHGNYTKQYPVFVGHKPGRNTTQRHRLDIQMIMIMNGTLYIAARDHIYTVDIDTSHTEEIYCSKKLTWKSRQADVDTCRMKGKHKDECHNFIKVLLKKNDDALFVCGTNAFNPSCRNYKMDTLEPFGDEFSGMARCPYDAKHANVALFADGKLYSATVTDFLAIDAVIYRSLGESPTLRTVKHDSKWLKEPYFVQAVDYGDYIYFFFREIAVEYNTMGKVVFPRVAQVCKNDMGGSQRVLEKQWTSFLKARLNCSVPGDSHFYFNILQAVTDVIRINGRDVVLATFSTPYNSIPGSAVCAYDMLDIASVFTGRFKEQKSPDSTWTPVPDERVPKPRPGCCAGSSSLERYATSNEFPDDTLNFIKTHPLMDEAVPSIFNRPWFLRTMVRYRLTKIAVDTAAGPYQNHTVVFLGSEKGIILKFLARIGNSGFLNDSLFLEEMSVYNSEKCSYDGVEDKRIMGMQLDRASSSLYVAFSTCVIKVPLGRCERYGKCKKTCIASRDPYCGWIKEGGACSHLSPNSRLTFEQDIERGNTDGLGDCHNSFVALNGHSSSLLPSTTTSDSTAQEGYESRGGMLDWKHLLDSPDSTDPLGAVSSHNHQDKKGVIRESYLKGHDQLVPVT

SEQ ID NO: 2981 - protein, 603 aa, synthetic construct
  REGION 1..603: note = SEMA6B (Q9H3T3) SP+PP+ECD
MQTPRASPPRPALLLLLLLLGGAHGLFPEEPPPLSVAPRDYLNHYPVFVGSGPGRLTPAEGADDLNIQRVLRVNRTLFIGDRDNLYRVELEPPTSTELRYQRKLTWRSNPSDINVCRMKGKQEGECRNFVKVLLLRDESTLFVCGSNAFNPVCANYSIDTLQPVGDNISGMARCPYDPKHANVALFSDGMLFTATVTDFLAIDAVIYRSLGDRPTLRTVKHDSKWFKEPYFVHAVEWGSHVYFFFREIAMEFNYLEKVVVSRVARVCKNDVGGSPRVLEKQWTSFLKARLNCSVPGDSHFYFNVLQAVTGVVSLGGRPVVLAVFSTPSNSIPGSAVCAFDLTQVAAVFEGRFREQKSPESIWTPVPEDQVPRPRPGCCAAPGMQYNASSALPDDILNFVKTHPLMDEAVPSLGHAPWILRTLMRHQLTRVAVDVGAGPWGNQTVVFLGSEAGTVLKFLVRPNASTSGTSGLSVFLEEFETYRPDRCGRPGGGETGQRLLSLELDAASGGLLAAFPRCVVRVPVARCQQYSGCMKNCIGSQDPYCGWAPDGSCIFLSPGTRAAFEQDVSGASTSGLGDCTGLLRASLSEDRAGLVSVNLLVTSS

SEQ ID NO: 2982 - protein, 604 aa, synthetic construct
  REGION 1..604: note = SEMA6C (Q9H3T2) SP+PP+ECD
MPRAPHFMPLLLLLLLLSLPHTQAAFPQDPLPLLISDLQGTSPLSWFRGLEDDAVAAELGLDFQRFLTLNRTLLVAARDHVFSFDLQAEEEGEGLVPNKYLTWRSQDVENCAVRGKLTDECYNYIRVLVPWDSQTLLACGTNSFSPVCRSYGITSLQQEGEELSGQARCPFDATQSNVAIFAEGSLYSATAADFQASDAVVYRSLGPQPPLRSAKYDSKWLREPHFVQALEHGDHVYFFFREVSVEDARLGRVQFSRVARVCKRDMGGSPRALDRHWTSFLKLRLNCSVPGDSTFYFDVLQALTGPVNLHGRSALFGVFTTQTNSIPGSAVCAFYLDEIERGFEGKFKEQRSLDGAWTPVSEDRVPSPRPGSCAGVGGAALFSSSRDLPDDVLTFIKAHPLLDPAVPPVTHQPLLTLTSRALLTQVAVDGMAGPHSNITVMFLGSNDGTVLKVLTPGGRSGGPEPILLEEIDAYSPARCSGKRTAQTARRIIGLELDTEGHRLFVAFSGCIVYLPLSRCARHGACQRSCLASQDPYCGWHSSRGCVDIRGSGGTDVDQAGNQESMEHGDCQDGATGSQSGPGDSAYGVRRDLPPASASRSVPIP

SEQ ID NO: 2983 - protein, 662 aa, synthetic construct
  REGION 1..662: note = SEMA6D (Q8NFY4) SP+PP+ECD
MRVFLLCAYILLLMVSQLRAVSFPEDDEPLNTVDYHYSRQYPVFRGRPSGNESQHRLDFQLMLKIRDTLYIAGRDQVYTVNLNEMPKTEVIPNKKLTWRSRQQDRENCAMKGKHKDECHNFIKVFVPRNDEMVFVCGTNAFNPMCRYYRLSTLEYDGEEISGLARCPFDARQTNVALFADGKLYSATVADFLASDAVIYRSMGDGSALRTIKYDSKWIKEPHFLHAIEYGNYVYFFFREIAVEHNNLGKAVYSRVARICKNDMGGSQRVLEKHWTSFLKARLNCSVPGDSFFYFDVLQSITDIIQINGIPTVVGVFTTQLNSIPGSAVCAFSMDDIEKVFKGRFKEQKTPDSVWTAVPEDKVPKPRPGCCAKHGLAEAYKTSIDFPDETLSFIKSHPLMDSAVPPIADEPWFTKTRVRYRLTAISVDHSAGPYQNYTVIFVGSEAGMVLKVLAKTSPFSLNDSVLLEEIEAYNHAKCSAENEEDKKVISLQLDKDHHALYVAFSSCIIRIPLSRCERYGSCKKSCIASRDPYCGWLSQGSCGRVTPGMLAEGYEQDTEFGNTAHLGDCHEILPTSTTPDYKIFGGPTSDMEVSSSSVTTMASIPEITPKVIDTWRPKLTSSRKFVVQDDPNTSDFTDPLSGIPKGVRWEVQSGESNQMVHMN

SEQ ID NO: 2984 - protein, 925 aa, synthetic construct
  REGION 1..925: note = SEZ6 (Q53EL9) SP+PP+ECD
MRPVALLLLPSLLALLAHGLSLEAPTVGKGQAPGIEETDGELTAAPTPEQPERGVHFVTTAPTLKLLNHHPLLEEFLQEGLEKGDEELRPALPFQPDPPAPFTPSPLPRLANQDSRPVFTSPTPAMAAVPTQPQSKEGPWSPESESPMLRITAPLPPGPSMAVPTLGPGEIASTTPPSRAWTPTQEGPGDMGRPWVAEVVSQGAGIGIQGTITSSTASGDDEETTTTTTIITTTITTVQTPGPCSWNFSGPEGSLDSPTDLSSPTDVGLDCFFYISVYPGYGVEIKVQNISLREGETVTVEGLGGPDPLPLANQSFLLRGQVIRSPTHQAALRFQSLPPPAGPGTFHFHYQAYLLSCHFPRRPAYGDVTVTSLHPGGSARFHCATGYQLKGARHLTCLNATQPFWDSKEPVCIAACGGVIRNATTGRIVSPGFPGNYSNNLTCHWLLEAPEGQRLHLHFEKVSLAEDDDRLIIRNGDNVEAPPVYDSYEVEYLPIEGLLSSGKHFFVELSTDSSGAAAGMALRYEAFQQGHCYEPFVKYGNFSSSTPTYPVGTTVEFSCDPGYTLEQGSIIIECVDPHDPQWNETEPACRAVCSGEITDSAGVVLSPNWPEPYGRGQDCIWGVHVEEDKRIMLDIRVLRIGPGDVLTFYDGDDLTARVLGQYSGPRSHFKLFTSMADVTIQFQSDPGTSVLGYQQGFVIHFFEVPRNDTCPELPEIPNGWKSPSQPELVHGTVVTYQCYPGYQVVGSSVLMCQWDLTWSEDLPSCQRVTSCHDPGDVEHSRRLISSPKFPVGATVQYICDQGFVLMGSSILTCHDRQAGSPKWSDRAPKCLLEQLKPCHGLSAPENGARSPEKQLHPAGATIHFSCAPGYVLKGQASIKCVPGHPSHWSDPPPICRAASLDGFYNSRSLDVAKAPAASSTLDAAH

SEQ ID NO: 2985 - protein, 844 aa, synthetic construct
  REGION 1..844: note = SEZ6L2 (Q6UXD5) SP+PP+ECD
MGTPRAQHPPPPQLLFLILLSCPWIQGLPLKEEEILPEPGSETPTVASEALAELLHGALLRRGPEMGYLPGSDRDPTLATPPAGQTLAVPSLPRATEPGTGPLTTAVTPNGVRGAGPTAPELLTPPPGTTAPPPPSPASPGPPLGPEGGEEETTTTIITTTTVTTTVTSPVLCNNNISEGEGYVESPDLGSPVSRTLGLLDCTYSIHVYPGYGIEIQVQTLNLSQEEELLVLAGGGSPGLAPRLLANSSMLGEGQVLRSPTNRLLLHFQSPRVPRGGGFRIHYQAYLLSCGFPPRPAHGDVSVTDLHPGGTATFHCDSGYQLQGEETLICLNGTRPSWNGETPSCMASCGGTIHNATLGRIVSPEPGGAVGPNLTCRWVIEAAEGRRLHLHFERVSLDEDNDRLMVRSGGSPLSPVIYDSDMDDVPERGLISDAQSLYVELLSETPANPLLLSLRFEAFEEDRCFAPFLAHGNVTTTDPEYRPGALATFSCLPGYALEPPGPPNAIECVDPTEPHWNDTEPACKAMCGGELSEPAGVVLSPDWPQSYSPGQDCVWGVHVQEEKRILLQVEILNVREGDMLTLFDGDGPSARVLAQLRGPQPRRRLLSSGPDLTLQFQAPPGPPNPGLGQGFVLHFKEVPRNDTCPELPPPEWGWRTASHGDLIRGTVLTYQCEPGYELLGSDILTCQWDLSWSAAPPACQKIMTCADPGEIANGHRTASDAGFPVGSHVQYRCLPGYSLEGAAMLTCYSRDTGTPKWSDRVPKCALKYEPCLNPGVPENGYQTLYKHHYQAGESLRFFCYEGFELIGEVTITCVPGHPSQWTSQPPLCKVTQTTDPSRQLEGGN

SEQ ID NO: 2986 - protein, 290 aa, synthetic construct
  REGION 1..290: note = SGCA (Q16586) SP+PP+ECD
MAETLFWTPLLVVLLAGLGDTEAQQTTLHPLVGRVFVHTLDHETFLSLPEHVAVPPAVHITYHAHLQGHPDLPRWLRYTQRSPHHPGFLYGSATPEDRGLQVIEVTAYNRDSFDTTRQRLVLEIGDPEGPLLPYQAEFLVRSHDAEEVLPSTPASRFLSALGGLWEPGELQLLNVTSALDRGGRVPLPIEGRKEGVYIKVGSASPFSTCLKMVASPDSHARCAQGQPPLLSCYDTLAPHFRVDWCNVTLVDKSVPEPADEVPTPGDGILEHDPFFCPPTEAPDRDFLVDA

SEQ ID NO: 2987 - protein, 87 aa, synthetic construct
  REGION 1..87: note = SHISA4 (Q96DD7) SP+PP+ECD
MPPAGLRRAAPLTAIALLVLGAPLVLAGEDCLWYLDRNGSWHPGFNCEFFTFCCGTCYHRYCCRDLTLLITERQQKHCLAFSPKTIA

SEQ ID NO: 2988 - protein, 174 aa, synthetic construct
  REGION 1..174: note = SHISA6 (Q6ZSJ9) SP+PP+ECD
MALRRLLLLLLLSLESLDLLPSVHGARGRAANRTLSAGGAAVGGRRAGGALARGGRELNGTARAPGIPEAGSRRGQPAAAVAAAASAAVTYETCWGYYDVSGQYDKEFECNNSESGYLYCCGTCYYRFCCKKRHEKLDQRQCTNYQSPVWVQTPSTKVVSPGPENKYDPEKDKT

SEQ ID NO: 2989 - protein, 186 aa, synthetic construct
  REGION 1..186: note = SHISA7 (A6NL88) SP+PP+ECD
MPALLLLVLLASSAGQARARPSNATSAEPAGPLPALLAHLRRLTGALTGGGGAASPGANGTRTGPAGGAGAAARAPPPAELCHGYYDVMGQYDATFNCSTGSYRFCCGTCHYRFCCEHRHMRLAQASCSNYDTPRWATTPPPLAGGAGGAGGAGGGPGPGQAGWLEGGRTGGAGGRGGEGPGGSTA

SEQ ID NO: 2990 - protein, 138 aa, synthetic construct
  REGION 1..138: note = SHISA8 (B8ZZ34) SP+PP+ECD
MARAGARGLLGGRRPPGLRLALALRLALLLARPPSGRAGAPEAQGPAAPGTTAPEGGDRCRGYYDVMGQWDPPFNCSSGAYSFCCGTCGYRFCCHDGPRRLDQSRCSNYDTPAWVQTGRPPARARDTAAPRDPGRERS

SEQ ID NO: 2991 - protein, 149 aa, synthetic construct
  REGION 1..149: note = SHISA9 (B4DS77) SP+PP+ECD
MRRVLRLLLGCFLTELCARVCRAQERAGHGQLAQLGGVLLLAGGNRSGAASGEASEGAEASDAPPTRAPTPDFCRGYFDVMGQWDPPFNCSSGDFIFCCGTCGFRFCCTFKKRRLNQSTCTNYDTPLWLNTGKPPARKDDPLHDPTKDK

SEQ ID NO: 2992 - protein, 1641 aa, synthetic construct
  REGION 1..1641: note = SIGLEC1 (Q9BZZ2) SP+PP+ECD
MGFLPKLLLLASFFPAGQASWGVSSPQDVQGVKGSCLLIPCIFSFPADVEVPDGITAIWYYDYSGQRQVVSHSADPKLVEARFRGRTEFMGNPEHRVCNLLLKDLQPEDSGSYNFRFEISEVNRWSDVKGTLVTVTEEPRVPTIASPVELLEGTEVDFNCSTPYVCLQEQVRLQWQGQDPARSVTFNSQKFEPTGVGHLETLHMAMSWQDHGRILRCQLSVANHRAQSEIHLQVKYAPKGVKILLSPSGRNILPGELVTLTCQVNSSYPAVSSIKWLKDGVRLQTKTGVLHLPQAAWSDAGVYTCQAENGVGSLVSPPISLHIFMAEVQVSPAGPILENQTVTLVCNTPNEAPSDLRYSWYKNHVLLEDAHSHTLRLHLATRADTGFYFCEVQNVHGSERSGPVSVVVNHPPLTPVLTAFLETQAGLVGILHCSVVSEPLATLVLSHGGHILASTSGDSDHSPRFSGTSGPNSLRLEIRDLEETDSGEYKCSATNSLGNATSTLDFHANAARLLISPAAEVVEGQAVTLSCRSGLSPTPDARFSWYLNGALLHEGPGSSLLLPAASSTDAGSYHCRARDGHSASGPSSPAVLTVLYPPRQPTFTTRLDLDAAGAGAGRRGLLLCRVDSDPPARLQLLHKDRVVATSLPSGGGCSTCGGCSPRMKVTKAPNLLRVEIHNPLLEEEGLYLCEASNALGNASTSATFNGQATVLAIAPSHTLQEGTEANLTCNVSREAAGSPANFSWFRNGVLWAQGPLETVTLLPVARTDAALYACRILTEAGAQLSTPVLLSVLYPPDRPKLSALLDMGQGHMALFICTVDSRPLALLALFHGEHLLATSLGPQVPSHGRFQAKAEANSLKLEVRELGLGDSGSYRCEATNVLGSSNTSLFFQVRGAWVQVSPSPELQEGQAVVLSCQVHTGVPEGTSYRWYRDGQPLQESTSATLRFAAITLTQAGAYHCQAQAPGSATTSLAAPISLHVSYAPRHVTLTTLMDTGPGRLGLLLCRVDSDPPAQLRLLHGDRLVASTLQGVGGPEGSSPRLHVAVAPNTLRLEIHGAMLEDEGVYICEASNTLGQASASADFDAQAVNVQVWPGATVREGQLVNLTCLVWTTHPAQLTYTWYQDGQQRLDAHSIPLPNVTVRDATSYRCGVGPPGRAPRLSRPITLDVLYAPRNLRLTYLLESHGGQLALVLCTVDSRPPAQLALSHAGRLLASSTAASVPNTLRLELRGPQPRDEGFYSCSARSPLGQANTSLELRLEGVRVILAPEAAVPEGAPITVTCADPAAHAPTLYTWYHNGRWLQEGPAASLSFLVATRAHAGAYSCQAQDAQGTRSSRPAALQVLYAPQDAVLSSFRDSRARSMAVIQCTVDSEPPAELALSHDGKVLATSSGVHSLASGTGHVQVARNALRLQVQDVPAGDDTYVCTAQNLLGSISTIGRLQVEGARVVAEPGLDVPEGAALNLSCRLLGGPGPVGNSTFAWFWNDRRLHAEPVPTLAFTHVARAQAGMYHCLAELPTGAAASAPVMLRVLYPPKTPTMMVFVEPEGGLRGILDCRVDSEPLASLTLHLGSRLVASSQPQGAPAEPHIHVLASPNALRVDIEALRPSDQGEYICSASNVLGSASTSTYFGVRALHRLHQFQQ

SEQ ID NO: 2993 - protein, 550 aa, synthetic construct
  REGION 1..550: note = SIGLEC10 (Q96LC7) SP+PP+ECD
MLLPLLLSSLLGGSQAMDGRFWIRVQESVMVPEGLCISVPCSFSYPRQDWTGSTPAYGYWFKAVTETTKGAPVATNHQSREVEMSTRGRFQLTGDPAKGNCSLVIRDAQMQDESQYFFRVERGSYVRYNFMNDGFFLKVTALTQKPDVYIPETLEPGQPVTVICVFNWAFEECPPPSFSWTGAALSSQGTKPTTSHFSVLSFTPRPQDHNTDLTCHVDFSRKGVSAQRTVRLRVAYAPRDLVISISRDNTPALEPQPQGNVPYLEAQKGQFLRLLCAADSQPPATLSWVLQNRVLSSSHPWGPRPLGLELPGVKAGDSGRYTCRAENRLGSQQRALDLSVQYPPENLRVMVSQANRTVLENLGNGTSLPVLEGQSLCLVCVTHSSPPARLSWTQRGQVLSPSQPSDPGVLELPRVQVEHEGEFTCHARHPLGSQHVSLSLSVHYSPKLLGPSCSWEAEGLHCSCSSQASPAPSLRWWLGEELLEGNSSQDSFEVTPSSAGPWANSSLSLHGGLSSGLRLRCEAWNVHGAQSGSILQLPDKKGLISTAFSN

SEQ ID NO: 2994 - protein, 561 aa, synthetic construct
  REGION 1..561: note = SIGLEC11 (Q96RL6) SP+PP+ECD
MVPGQAQPQSPEMLLLPLLLPVLGAGSLNKDPSYSLQVQRQVPVPEGLCVIVSCNLSYPRDGWDESTAAYGYWFKGRTSPKTGAPVATNNQSREVEMSTRDRFQLTGDPGKGSCSLVIRDAQREDEAWYFFRVERGSRVRHSFLSNAFFLKVTALTKKPDVYIPETLEPGQPVTVICVFNWAFKKCPAPSFSWTGAALSPRRTRPSTSHFSVLSFTPSPQDHDTDLTCHVDFSRKGVSAQRTVRLRVAYAPKDLIISISHDNTSALELQGNVIYLEVQKGQFLRLLCAADSQPPATLSWVLQDRVLSSSHPWGPRTLGLELRGVRAGDSGRYTCRAENRLGSQQQALDLSVQYPPENLRVMVSQANRTVLENLGNGTSLPVLEGQSLRLVCVTHSSPPARLSWTRWGQTVGPSQPSDPGVLELPPIQMEHEGEFTCHAQHPLGSQHVSLSLSVHYPPQLLGPSCSWEAEGLHCSCSSQASPAPSLRWWLGEELLEGNSSQGSFEVTPSSAGPWANSSLSLHGGLSSGLRLRCKAWNVHGAQSGSVFQLLPGKLEHGGGLGL

SEQ ID NO: 2995 - protein, 481 aa, synthetic construct
  REGION 1..481: note = SIGLEC12 (Q96PQ1) SP+PP+ECD
MLLLLLLLPPLLCGRVGAKEQKDYLLTMQKSVTVQEGLCVSVLCSFSYPQNGWTASDPVHGYWFRAGDHVSRNIPVATNNPARAVQEETRDRFHLLGDPQNKDCTLSIRDTRESDAGTYVFCVERGNMKWNYKYDQLSVNVTASQDLLSRYRLEVPESVTVQEGLCVSVPCSVLYPHYNWTASSPVYGSWFKEGADIPWDIPVATNTPSGKVQEDTHGRFLLLGDPQTNNCSLSIRDARKGDSGKYYFQVERGSRKWNYIYDKLSVHVTALTHMPTFSIPGTLESGHPRNLTCSVPWACEQGTPPTITWMGASVSSLDPTITRSSMLSLIPQPQDHGTSLTCQVTLPGAGVTMTRAVRLNISYPPQNLTMTVFQGDGTASTTLRNGSALSVLEGQSLHLVCAVDSNPPARLSWTWGSLTLSPSQSSNLGVLELPRVHVKDEGEFTCRAQNPLGSQHISLSLSLQNEYTGKMRPISGVTLGA

SEQ ID NO: 2996 - protein, 358 aa, synthetic construct
  REGION 1..358: note = SIGLEC14 (Q08ET2) SP+PP+ECD
MLPLLLLPLLWGGSLQEKPVYELQVQKSVTVQEGLCVLVPCSFSYPWRSWYSSPPLYVYWFRDGEIPYYAEVVATNNPDRRVKPETQGRFRLLGDVQKKNCSLSIGDARMEDTGSYFFRVERGRDVKYSYQQNKLNLEVTALIEKPDIHFLEPLESGRPTRLSCSLPGSCEAGPPLTFSWTGNALSPLDPETTRSSELTLTPRPEDHGTNLTCQVKRQGAQVTTERTVQLNVSYAPQNLAISIFFRNGTGTALRILSNGMSVPIQEGQSLFLACTVDSNPPASLSWFREGKALNPSQTSMSGTLELPNIGAREGGEFTCRVQHPLGSQHLSFILSVQRSSSSCICVTEKQQGSWPLVL

SEQ ID NO: 2997 - protein, 263 aa, synthetic construct
  REGION 1..263: note = SIGLEC15 (Q6ZMC9) SP+PP+ECD
MEKSIWLLACLAWVLPTGSFVRTKIDTTENLLNTEVHSSPAQRWSMQVPPEVSAEAGDAAVLPCTFTHPHRHYDGPLTAIWRAGEPYAGPQVFRCAAARGSELCQTALSLHGRFRLLGNPRRNDLSLRVERLALADDRRYFCRVEFAGDVHDRYESRHGVRLHVTAAPRIVNISVLPSPAHAFRALCTAEGEPPPALAWSGPALGNSLAAVRSPREGHGHLVTAELPALTHDGRYTCTAANSLGRSEASVYLFRFHGASGAST

SEQ ID NO: 2998 - protein, 434 aa, synthetic construct
  REGION 1..434: note = SIGLEC16 (A6NMB1) SP+PP+ECD
MLLLPLLLPVLGAGSLNKDPSYSLQVQRQVPVPEGLCVIVSCNLSYPRDGWDESTAAYGYWFKGRTSPKTGAPVATNNQSREVAMSTRDRFQLTGDPGKGSCSLVIRDAQREDEAWYFFRVERGSRVRHSFLSNAFFLKVTALTQKPDVYIPETLEPGQPVTVICVFNWAFKKCPAPSFSWTGAALSPRRTRPSTSHFSVLSFTPSPQDHDTDLTCHVDFSRKGVSAQRTVRLRVASLELQGNVIYLEVQKGQFLRLLCAADSQPPATLSWVLQDRVLSSSHPWGPRTLGLELPGVKAGDSGRYTCRAENRLGSQQRALDLSVQYPPENLRVMVSQANRTVLENLRNGTSLRVLEGQSLRLVCVTHSSPPARLSWTWGEQTVGPSQPSDPGVLQLPRVQMEHEGEFTCHARHPLGSQRVSLSFSVHCKSGPMTG

SEQ ID NO: 2999 - protein, 441 aa, synthetic construct
  REGION 1..441: note = SIGLEC5 (O15389) SP+PP+ECD
MLPLLLLPLLWGGSLQEKPVYELQVQKSVTVQEGLCVLVPCSFSYPWRSWYSSPPLYVYWFRDGEIPYYAEVVATNNPDRRVKPETQGRFRLLGDVQKKNCSLSIGDARMEDTGSYFFRVERGRDVKYSYQQNKLNLEVTALIEKPDIHFLEPLESGRPTRLSCSLPGSCEAGPPLTFSWTGNALSPLDPETTRSSELTLTPRPEDHGTNLTCQMKRQGAQVTTERTVQLNVSYAPQTITIFRNGIALEILQNTSYLPVLEGQALRLLCDAPSNPPAHLSWFQGSPALNATPISNTGILELRRVRSAEEGGFTCRAQHPLGFLQIFLNLSVYSLPQLLGPSCSWEAEGLHCRCSFRARPAPSLCWRLEEKPLEGNSSQGSFKVNSSSAGPWANSSLILHGGLSSDLKVSCKAWNIYGSQSGSVLLLQGRSNLGTGVVPAAL

SEQ ID NO: 3000 - protein, 347 aa, synthetic construct
  REGION 1..347: note = SIGLEC6 (O43699) SP+PP+ECD
MQGAQEASASEMLPLLLPLLWAGALAQERRFQLEGPESLTVQEGLCVLVPCRLPTTLPASYYGYGYWFLEGADVPVATNDPDEEVQEETRGRFHLLWDPRRKNCSLSIRDARRRDNAAYFFRLKSKWMKYGYTSSKLSVRVMALTHRPNISIPGTLESGHPSNLTCSVPWVCEQGTPPIFSWMSAAPTSLGPRTTQSSVLTITPRPQDHSTNLTCQVTFPGAGVTMERTIQLNVSYAPQKVAISIFQGNSAAFKILQNTSSLPVLEGQALRLLCDADGNPPAHLSWFQGFPALNATPISNTGVLELPQVGSAEEGDFTCRAQHPLGSLQISLSLFVHWKPEGRAGGV

SEQ ID NO: 3001 - protein, 353 aa, synthetic construct
  REGION 1..353: note = SIGLEC7 (Q9Y286) SP+PP+ECD
MLLLLLLPLLWGRERVEGQKSNRKDYSLTMQSSVTVQEGMCVHVRCSFSYPVDSQTDSDPVHGYWFRAGNDISWKAPVATNNPAWAVQEETRDRFHLLGDPQTKNCTLSIRDARMSDAGRYFFRMEKGNIKWNYKYDQLSVNVTALTHRPNILIPGTLESGCFQNLTCSVPWACEQGTPPMISWMGTSVSPLHPSTTRSSVLTLIPQPQHHGTSLTCQVTLPGAGVTTNRTIQLNVSYPPQNLTVTVFQGEGTASTALGNSSSLSVLEGQSLRLVCAVDSNPPARLSWTWRSLTLYPSQPSNPLVLELQVHLGDEGEFTCRAQNSLGSQHVSLNLSLQQEYTGKMRPVSGVLL

SEQ ID NO: 3002 - protein, 363 aa, synthetic construct
  REGION 1..363: note = SIGLEC8 (Q9NYZ4) SP+PP+ECD
MLLLLLLLPLLWGTKGMEGDRQYGDGYLLQVQELVTVQEGLCVHVPCSFSYPQDGWTDSDPVHGYWFRAGDRPYQDAPVATNNPDREVQAETQGRFQLLGDIWSNDCSLSIRDARKRDKGSYFFRLERGSMKWSYKSQLNYKTKQLSVFVTALTHRPDILILGTLESGHSRNLTCSVPWACKQGTPPMISWIGASVSSPGPTTARSSVLTLTPKPQDHGTSLTCQVTLPGTGVTTTSTVRLDVSYPPWNLTMTVFQGDATASTALGNGSSLSVLEGQSLRLVCAVNSNPPARLSWTRGSLTLCPSRSSNPGLLELPRVHVRDEGEFTCRAQNAQGSQHISLSLSLQNEGTGTSRPVSQVTLAA

SEQ ID NO: 3003 - protein, 348 aa, synthetic construct
  REGION 1..348: note = SIGLEC9 (Q9Y336) SP+PP+ECD
MLLLLLPLLWGRERAEGQTSKLLTMQSSVTVQEGLCVHVPCSFSYPSHGWIYPGPVVHGYWFREGANTDQDAPVATNNPARAVWEETRDRFHLLGDPHTKNCTLSIRDARRSDAGRYFFRMEKGSIKWNYKHHRLSVNVTALTHRPNILIPGTLESGCPQNLTCSVPWACEQGTPPMISWIGTSVSPLDPSTTRSSVLTLIPQPQDHGTSLTCQVTFPGASVTTNKTVHLNVSYPPQNLTMTVFQGDGTVSTVLGNGSSLSLPEGQSLRLVCAVDAVDSNPPARLSLSWRGLTLCPSQPSNPGVLELPWVHLRDAAEFTCRAQNPLGSQQVYLNVSLQSKATSGVTQG

SEQ ID NO: 3004 - protein, 373 aa, synthetic construct
  REGION 1..373: note = SIRPA (P78324) SP+PP+ECD
MEPAGPAPGRLGPLLCLLLAASCAWSGVAGEEELQVIQPDKSVLVAAGETATLRCTATSLIPVGPIQWFRGAGPGRELIYNQKEGHFPRVTTVSDLTKRNNMDFSIRIGNITPADAGTYYCVKFRKGSPDDVEFKSGAGTELSVRAKPSAPVVSGPAARATPQHTVSFTCESHGFSPRDITLKWFKNGNELSDFQTNVDPVGESVSYSIHSTAKVVLTREDVHSQVICEVAHVTLQGDPLRGTANLSETIRVPPTLEVTQQPVRAENQVNVTCQVRKFYPQRLQLTWLENGNVSRTETASTVTENKDGTYNWMSWLLVNVSAHRDDVKLTCQVEHDGQPAVSKSHDLKVSAHPKEQGSNTAAENTGSNERNIY

SEQ ID NO: 3005 - protein, 371 aa, synthetic construct
  REGION 1..371: note = SIRPB1 (O00241) SP+PP+ECD
MPVPASWPHLPSPFLLMTLLLGRLTGVAGEDELQVIQPEKSVSVAAGESATLRCAMTSLIPVGPIMWFRGAGAGRELIYNQKEGHFPRVTTVSELTKRNNLDFSISISNITPADAGTYYCVKFRKGSPDDVEFKSGAGTELSVRAKPSAPVVSGPAVRATPEHTVSFTCESHGFSPRDITLKWFKNGNELSDFQTNVDPAGDSVSYSIHSTARVVLTRGDVHSQVICEIAHITLQGDPLRGTANLSEAIRVPPTLEVTQQPMRAENQANVTCQVSNFYPRGLQLTWLENGNVSRTETASTLIENKDGTYNWMSWLLVNTCAHRDDVVLTCQVEHDGQQAVSKSYALEISAHQKEHGSDITHEAALAPTAPL

SEQ ID NO: 3006 - protein, 371 aa, synthetic construct; identical to SEQ ID NO: 3005
  REGION 1..371: note = SIRPB1 (Q5TFQ8) SP+PP+ECD

SEQ ID NO: 3007 - protein, 287 aa, synthetic construct
  REGION 1..287: note = SIRPB2 (Q5JXA9) SP+PP+ECD
MCSTMSAPTCLAHLPPCFLLLALVLVPSDASGQSSRNDWQVLQPEGPMLVAEGETLLLRCMVVGSCTDGMIKWVKVSTQDQQEIYNFKRGSFPGVMPMIQRTSEPLNCDYSIYIHNVTREHTGTYHCVRFDGLSEHSEMKSDEGTSVLVKGAGDPEPDLWIIQPQELVLGTTGDTVFLNCTVLGDGPPGPIRWFQGAGLSREAIYNFGGISHPKETAVQASNNDFSILLQNVSSEDAGTYYCVKFQRKPNRQYLSGQGTSLKVKAKSTSSKEAEFTSEPATEMSPTG

SEQ ID NO: 3008 - protein, 360 aa, synthetic construct
  REGION 1..360: note = SIRPG (Q9P1W8) SP+PP+ECD
MPVPASWPHPPGPFLLLTLLLGLTEVAGEEELQMIQPEKLLLVTVGKTATLHCTVTSLLPVGPVLWFRGVGPGRELIYNQKEGHFPRVTTVSDLTKRNNMDFSIRISSITPADVGTYYCVKFRKGSPENVEFKSGPGTEMALGAKPSAPVVLGPAARTTPEHTVSFTCESHGFSPRDITLKWFKNGNELSDFQTNVDPTGQSVAYSIRSTARVVLDPWDVRSQVICEVAHVTLQGDPLRGTANLSEAIRVPPTLEVTQQPMRVGNQVNVTCQVRKFYPQSLQLTWSENGNVCQRETASTLTENKDGTYNWTSWFLVNISDQRDDVVLTCQVKHDGQLAVSKRLALEVTVHQKDQSSDATP

SEQ ID NO: 3009 - protein, 40 aa, synthetic construct
  REGION 1..40: note = SIT1 (Q9Y3P8) SP+PP+ECD
MNQADPRLRAVCLWTLTSAAMSRGDNCTDLLALGIPSITQ

SEQ ID NO: 3010 - protein, 237 aa, synthetic construct
  REGION 1..237: note = SLAMF1 (Q13291) SP+PP+ECD
MDPKGLLSLTFVLFLSLAFGASYGTGGRMMNCPKILRQLGSKVLLPLTYERINKSMNKSIHIVVTMAKSLENSVENKIVSLDPSEAGPPRYLGDRYKFYLENLTLGIRESRKEDEGWYLMTLEKNVSVQRFCLQLRLYEQVSTPEIKVLNKTQENGTCTLILGCTVEKGDHVAYSWSEKAGTHPLNPANSSHLLSLTLGPQHADNIYICTVSNPISNNSQTFSPWPGCRTDPSETKP

SEQ ID NO: 3011 - protein, 226 aa, synthetic construct
  REGION 1..226: note = SLAMF6 (Q96DU3) SP+PP+ECD
MLWLFQSLLFVFCFGPGNVVSQSSLTPLMVNGILGESVTLPLEFPAGEKVNFITWLFNETSLAFIVPHETKSPEIHVTNPKQGKRLNFTQSYSLQLSNLKMEDTGSYRAQISTKTSAKLSSYTLRILRQLRNIQVTNHSQLFQNMTCELHLTCSVEDADDNVSFRWEALGNTLSSQPNLTVSWDPRISSEQDYTCIAENAVSNLSFSVSAQKLCEDVKIQYTDTKM

SEQ ID NO: 3012 - protein, 226 aa, synthetic construct
  REGION 1..226: note = SLAMF7 (Q9NQ25) SP+PP+ECD
MAGSPTCLTLIYILWQLTGSAASGPVKELVGSVGGAVTFPLKSKVKQVDSIVWTFNTTPLVTIQPEGGTIIVTQNRNRERVDFPDGGYSLKLSKLKKNDSGIYYVGIYSSSLQQPSTQEYVLHVYEHLSKPKVTMGLQSNKNGTCVTNLTCCMEHGEEDVIYTWKALGQAANESHNGSILPISWRWGESDMTFICVARNPVSRNFSSPILARKLCEGAADDPDSSM

SEQ ID NO: 3013 - protein, 233 aa, synthetic construct
  REGION 1..233: note = SLAMF8 (Q9P0V8) SP+PP+ECD
MVMRPLWSLLLWEALLPITVTGAQVLSKVGGSVLLVAARPPGFQVREAIWRSLWPSEELLATFFRGSLETLYHSRFLGRAQLHSNLSLELGPLESGDSGNFSVLMVDTRGQPWTQTLQLKVYDAVPRPVVQVFIAVERDAQPSKTCQVFLSCWAPNISEITYSWRRETTMDFGMEPHSLFTDGQVLSISLGPGDRDVAYSCIVSNPVSWDLATVTPWDSCHHEAAPGKASYKD

SEQ ID NO: 3014 - protein, 236 aa, synthetic construct
  REGION 1..236: note = SLAMF9 (Q96A28) SP+PP+ECD
MCAFPWLLLLLLLQEGSQRRLWRWCGSEEVVAVLQESISLPLEIPPDEEVENIIWSSHKSLATVVPGKEGHPATIMVTNPHYQGQVSFLDPSYSLHISNLSWEDSGLYQAQVNLRTSQISTMQQYNICVYRWLSEPQITVNFESSGEGACSMSLVCSVEKAGMDMTYSWLSRGDSTYTFHEGPVLSTSWRPGDSALSYTCRANNPISNVSSCPIPDGPFYADPNYASEKPSTAFCL

SEQ ID NO: 3015 - protein, 622 aa, synthetic construct
  REGION 1..622: note = SLITRK1 (Q96PX8) SP+PP+ECD
MLLWILLLETSLCFAAGNVTGDVCKEKICSCNEIEGDLHVDCEKKGFTSLQRFTAPTSQFYHLFLHGNSLTRLFPNEFANFYNAVSLHMENNGLHEIVPGAFLGLQLVKRLHINNNKIKSFRKQTFLGLDDLEYLQADFNLLRDIDPGAFQDLNKLEVLILNDNLISTLPANVFQYVPITHLDLRGNRLKTLPYEEVLEQIPGIAEILLEDNPWDCTCDLLSLKEWLENIPKNALIGRVVCEAPTRLQGKDLNETTEQDLCPLKNRVDSSLPAPPAQEETFAPGPLPTPFKTNGQEDHATPGSAPNGGTKIPGNWQIKIRPTAAIATGSSRNKPLANSLPCPGGCSCDHIPGSGLKMNCNNRNVSSLADLKPKLSNVQELFLRDNKIHSIRKSHFVDYKNLILLDLGNNNIATVENNTFKNLLDLRWLYMDSNYLDTLSREKFAGLQNLEYLNVEYNAIQLILPGTFNAMPKLRILILNNNLLRSLPVDVFAGVSLSKLSLHNNYFMYLPVAGVLDQLTSIIQIDLHGNPWECSCTIVPFKQWAERLGSEVLMSDLKCETPVNFFRKDFMLLSNDEICPQLYARISPTLTSHSKNSTGLAETGTHSNSYLDTSRVSISVLVP

SEQ ID NO: 3016 - protein, 621 aa, synthetic construct
  REGION 1..621: note = SLITRK2 (Q9H156) SP+PP+ECD
MLSGVWFLSVLTVAGILQTESRKTAKDICKIRCLCEEKENVLNINCENKGFTTVSLLQPPQYRIYQLFLNGNLLTRLYPNEFVNYSNAVTLHLGNNGLQEIRTGAFSGLKTLKRLHLNNNKLEILREDTFLGLESLEYLQADYNYISAIEAGAFSKLNKLKVLILNDNLLLSLPSNVFRFVLLTHLDLRGNRLKVMPFAGVLEHIGGIMEIQLEENPWNCTCDLLPLKAWLDTITVFVGEIVCETPFRLHGKDVTQLTRQDLCPRKSASDSSQRGSHADTHVQRLSPTMNPALNPTRAPKASRPPKMRNRPTPRVTVSKDRQSFGPIMVYQTKSPVPLTCPSSCVCTSQSSDNGLNVNCQERKFTNISDLQPKPTSPKKLYLTGNYLQTVYKNDLLEYSSLDLLHLGNNRIAVIQEGAFTNLTSLRRLYLNGNYLEVLYPSMFDGLQSLQYLYLEYNVIKEIKPLTFDALINLQLLFLNNNLLRSLPDNIFGGTALTRLNLRNNHFSHLPVKGVLDQLPAFIQIDLQENPWDCTCDIMGLKDWTEHANSPVIINEVTCESPAKHAGEILKFLGREAICPDSPNLSDGTVLSMNHNTDTPRSLSVSPSSYPELHTEVPLSVL

SEQ ID NO: 3017 - protein, 618 aa, synthetic construct
  REGION 1..618: note = SLITRK4 (Q8IW52) SP+PP+ECD
MFLWLFLILSALISSTNADSDISVEICNVCSCVSVENVLYVNCEKVSVYRPNQLKPPWSNFYHLNFQNNFLNILYPNTFLNFSHAVSLHLGNNKLQNIEGGAFLGLSALKQLHLNNNELKILRADTFLGIENLEYLQADYNLIKYIERGAFNKLHKLKVLILNDNLISFLPDNIFRFASLTHLDIRGNRIQKLPYIGVLEHIGRVVELQLEDNPWNCSCDLLPLKAWLENMPYNIYIGEAICETPSDLYGRLLKETNKQELCPMGTGSDFDVRILPPSQLENGYTTPNGHTTQTSLHRLVTKPPKTTNPSKISGIVAGKALSNRNLSQIVSYQTRVPPLTPCPAPCFCKTHPSDLGLSVNCQEKNIQSMSELIPKPLNAKKLHVNGNSIKDVDVSDFTDFEGLDLLHLGSNQITVIKGDVFHNLTNLRRLYLNGNQIERLYPEIFSGLHNLQYLYLEYNLIKEISAGTFDSMPNLQLLYLNNNLLKSLPVYIFSGAPLARLNLRNNKFMYLPVSGVLDQLQSLTQIDLEGNPWDCTCDLVALKLWVEKLSDGIVVKELKCETPVQFANIELKSLKNEILCPKLLNKPSAPFTSPAPAITFTTPLGPIRSPPGGPVPLS

SEQ ID NO: 3018 - protein, 664 aa, synthetic construct
  REGION 1..664: note = SLITRK5 (O94991) SP+PP+ECD
MHTCCPPVTLEQDLHRKMHSWMLQTLAFAVTSLVLSCAETIDYYGEICDNACPCEEKDGILTVSCENRGIISLSEISPPRFPIYHLLLSGNLLNRLYPNEFVNYTGASILHLGSNVIQDIETGAFHGLRGLRRLHLNNNKLELLRDDTFLGLENLEYLQVDYNYISVIEPNAFGKLHLLQVLILNDNLLSSLPNNLFRFVPLTHLDLRGNRLKLLPYVGLLQHMDKVVELQLEENPWNCSCELISLKDWLDSISYSALVGDVVCETPFRLHGRDLDEVSKQELCPRRLISDYEMRPQTPLSTTGYLHTTPASVNSVATSSSAVYKPPLKPPKGTRQPNKPRVRPTSRQPSKDLGYSNYGPSIAYQTKSPVPLECPTACSCNLQISDLGLNVNCQERKIESIAELQPKPYNPKKMYLTENYIAVVRRTDFLEATGLDLLHLGNNRISMIQDRAFGDLTNLRRLYLNGNRIERLSPELFYGLQSLQYLFLQYNLIREIQSGTFDPVPNLQLLFLNNNLLQAMPSGVFSGLTLLRLNLRSNHFTSLPVSGVLDQLKSLIQIDLHDNPWDCTCDIVGMKLWVEQLKVGVLVDEVICKAPKKFAETDMRSIKSELLCPDYSDVVVSTPTPSSIQVPARTSAVTPAVRLNSTGAPASLGAGGGASSVPLS

SEQ ID NO: 3019 - protein, 608 aa, synthetic construct
  REGION 1..608: note = SLITRK6 (Q9H5Y7) SP+PP+ECD
MKLWIHLFYSSLLACISLHSQTPVLSSRGSCDSLCNCEEKDGTMLINCEAKGIKMVSEISVPPSRPFQLSLLNNGLTMLHTNDFSGLTNAISIHLGFNNIADIEIGAFNGLGLLKQLHINHNSLEILKEDTFHGLENLEFLQADNNFITVIEPSAFSKLNRLKVLILNDNAIESLPPNIFRFVPLTHLDLRGNQLQTLPYVGFLEHIGRILDLQLEDNKWACNCDLLQLKTWLENMPPQSIIGDVVCNSPPFFKGSILSRLKKESICPTPPVYEEHEDPSGSLHLAATSSINDSRMSTKTTSILKLPTKAPGLIPYITKPSTQLPGPYCPIPCNCKVLSPSGLLIHCQERNIESLSDLRPPPQNPRKLILAGNIIHSLMKSDLVEYFTLEMLHLGNNRIEVLEEGSFMNLTRLQKLYLNGNHLTKLSKGMFLGLHNLEYLYLEYNAIKEILPGTFNPMPKLKVLYLNNNLLQVLPPHIFSGVPLTKVNLKTNQFTHLPVSNILDDLDLLTQIDLEDNPWDCSCDLVGLQQWIQKLSKNTVTDDILCTSPGHLDKKELKALNSEILCPGLVNNPSMPTQTSYLMVTTPATTTNTADTILRSLTDAVPLS

SEQ ID NO: 3020 - protein, 1099 aa, synthetic construct
  REGION 1..1099: note = SORCS1 (Q8WY21) SP+PP+ECD
MGKVGAGGGSQARLSALLAGAGLLILCAPGVCGGGSCCPSPHPSSAPRSASTPRGFSHQGRPGRAPATPLPLVVRPLFSVAPGDRALSLERARGTGASMAVAARSGRRRRSGADQEKAERGEGASRSPRGVLRDGGQQEPGTRERDPDKATRFRMEELRLTSTTFALTGDSAHNQAMVHWSGHNSSVILILTKLYDYNLGSITESSLWRSTDYGTTYEKLNDKVGLKTILSYLYVCPTNKRKIMLLTDPEIESSLLISSDEGATYQKYRLNFYIQSLLFHPKQEDWILAYSQDQKLYSSAEFGRRWQLIQEGVVPNRFYWSVMGSNKEPDLVHLEARTVDGHSHYLTCRMQNCTEANRNQPFPGYIDPDSLIVQDHYVFVQLTSGGRPHYYVSYRRNAFAQMKLPKYALPKDMHVISTDENQVFAAVQEWNQNDTYNLYISDTRGVYFTLALENVQSSRGPEGNIMIDLYEVAGIKGMFLANKKIDNQVKTFITYNKGRDWRLLQAPDTDLRGDPVHCLLPYCSLHLHLKVSENPYTSGIIASKDTAPSIIVASGNIGSELSDTDISMFVSSDAGNTWRQIFEEEHSVLYLDQGGVLVAMKHTSLPIRHLWLSFDEGRSWSKYSFTSIPLFVDGVLGEPGEETLIMTVFGHFSHRSEWQLVKVDYKSIFDRRCAEEDYRPWQLHSQGEACIMGAKRIYKKRKSERKCMQGKYAGAMESEPCVCTEADFDCDYGYERHSNGQCLPAFWFNPSSLSKDCSLGQSYLNSTGYRKVVSNNCTDGVREQYTAKPQKCPGKAPRGLRIVTADGKLTAEQGHNVTLMVQLEEGDVQRTLIQVDFGDGIAVSYVNLSSMEDGIKHVYQNVGIFRVTVQVDNSLGSDSAVLYLHVTCPLEHVHLSLPFVTTKNKEVNATAVLWPSQVGTLTYVWWYGNNTEPLITLEGSISFRFTSEGMNTITVQVSAGNAILQDTKTIAVYEEFRSLRLSFSPNLDDYNPDIPEWRRDIGRVIKKSLVEATGVPGQHILVAVLPGLPTTAELFVLPYQDPAGENKRSTDDLEQISELLIHTLNQNSVHFELKPGVRVLVHAAHLTAAPLVDLTPTHS

SEQ ID NO: 3021 - protein, 1078 aa, synthetic construct
  REGION 1..1078: note = SORCS2 (Q96PQ0) SP+PP+ECD
MAHRGPSRASKGPGPTARAPSPGAPPPPRSPRSRPLLLLLLLLGACGAAGRSPEPGRLGPHAQLTRVPRSPPAGRAEPGGGEDRQARGTEPGAPGPSPGPAPGPGEDGAPAAGYRRWERAAPLAGVASRAQVSLISTSFVLKGDATHNQAMVHWTGENSSVILILTKYYHADMGKVLESSLWRSSDFGTSYTKLTLQPGVTTVIDNFYICPTNKRKVILVSSSLSDRDQSLFLSADEGATFQKQPIPFFVETLIFHPKEEDKVLAYTKESKLYVSSDLGKKWTLLQERVTKDHVFWSVSGVDADPDLVHVEAQDLGGDFRYVTCAIHNCSEKMLTAPFAGPIDHGSLTVQDDYIFFKATSANQTKYYVSYRRNEFVLMKLPKYALPKDLQIISTDESQVFVAVQEWYQMDTYNLYQSDPRGVRYALVLQDVRSSRQAEESVLIDILEVRGVKGVFLANQKIDGKVMTLITYNKGRDWDYLRPPSMDMNGKPTNCKPPDCHLHLHLRWADNPYVSGTVHTKDTAPGLIMGAGNLGSQLVEYKEEMYITSDCGHTWRQVFEEEHHILYLDHGGVIVAIKDTSIPLKILKFSVDEGLTWSTHNFTSTSVFVDGLLSEPGDETLVMTVFGHISFRSDWELVKVDFRPSFSRQCGEEDYSSWELSNLQGDRCIMGQQRSFRKRKSTSWCIKGRSFTSALTSRVCECRDSDFLCDYGFERSSSSESSTNKCSANFWFNPLSPPDDCALGQTYTSSLGYRKVVSNVCEGGVDMQQSQVQLQCPLTPPRGLQVSIQGEAVAVRPGEDVLFVVRQEQGDVLTTKYQVDLGDGFKAMYVNLTLTGEPIRHRYESPGIYRVSVRAENTAGHDEAVLFVQVNSPLQALYLEVVPVIGLNQEVNLTAVLLPLNPNLTVFYWWIGHSLQPLLSLDNSVTTRFSDTGDVRVTVQAACGNSVLQDSRVLRVLDQFQVMPLQFSKELDAYNPNTPEWREDVGLVVTRLLSKETSVPQELLVTVVKPGLPTLADLYVLLPPPRPTRKRSLSSDKRLAAIQQVLNAQKISFLLRGGVRVLVALRDTGTGAEQLGGGG

SEQ ID NO: 3022 - protein, 1125 aa, synthetic construct
  REGION 1..1125: note = SORCS3 (Q9UPU3) SP+PP+ECD
MEAARTERPAGRPGAPLVRTGLLLLSTWVLAGAEITWDATGGPGRPAAPASRPPALSPLSPRAVASQWPEELASARRAAVLGRRAGPELLPQQGGGRGGEMQVEAGGTSPAGERRGRGIPAPAKLGGARRSRRAQPPITQERGDAWATAPADGSRGSRPLAKGSREEVKAPRAGGSAAEDLRLPSTSFALTGDSAHNQAMVHWSGHNSSVILILTKLYDFNLGSVTESSLWRSTDYGTTYEKLNDKVGLKTVLSYLYVNPTNKRKIMLLSDPEMESSILISSDEGATYQKYRLTFYIQSLLFHPKQEDWVLAYSLDQKLYSSMDFGRRWQLMHERITPNRFYWSVAGLDKEADLVHMEVRTTDGYAHYLTCRIQECAETTRSGPFARSIDISSLVVQDEYIFIQVTTSGRASYYVSYRREAFAQIKLPKYSLPKDMHIISTDENQVFAAVQEWNQNDTYNLYISDTRGIYFTLAMENIKSSRGLMGNIIIELYEVAGIKGIFLANKKVDDQVKTYITYNKGRDWRLLQAPDVDLRGSPVHCLLPFCSLHLHLQLSENPYSSGRISSKETAPGLVVATGNIGPELSYTDIGVFISSDGGNTWRQIFDEEYNVWFLDWGGALVAMKHTPLPVRHLWVSFDEGHSWDKYGFTSVPLFVDGALVEAGMETHIMTVFGHFSLRSEWQLVKVDYKSIFSRHCTKEDYQTWHLLNQGEPCVMGERKIFKKRKPGAQCALGRDHSGSVVSEPCVCANWDFECDYGYERHGESQCVPAFWYNPASPSKDCSLGQSYLNSTGYRRIVSNNCTDGLREKYTAKAQMCPGKAPRGLHVVTTDGRLVAEQGHNATFIILMEEGDLQRTNIQLDFGDGIAVSYANFSPIEDGIKHVYKSAGIFQVTAYAENNLGSDTAVLFLHVVCPVEHVHLRVPFVAIRNKEVNISAVVWPSQLGTLTYFWWFGNSTKPLITLDSSISFTFLAEGTDTITVQVAAGNALIQDTKEIAVHEYFQSQLLSFSPNLDYHNPDIPEWRKDIGNVIKRALVKVTSVPEDQILIAVFPGLPTSAELFILPPKNLTERRKGNEGDLEQIVETLFNALNQNLVQFELKPGVQVIVYVTQLTLAPLVDSSAGHSSS

SEQ ID NO: 3023 - protein, 2137 aa, synthetic construct
  REGION 1..2137: note = SORL1 (Q92673) SP+PP+ECD
MATRSSRRESRLPFLFTLVALLPPGALCEVWTQRLHGGSAPLPQDRGFLVVQGDPRELRLWARGDARGASRADEKPLRRKRSAALQPEPIKVYGQVSLNDSHNQMVVHWAGEKSNVIVALARDSLALARPKSSDVYVSYDYGKSFKKISDKLNFGLGNRSEAVIAQFYHSPADNKRYIFADAYAQYLWITFDFCNTLQGFSIPFRAADLLLHSKASNLLLGFDRSHPNKQLWKSDDFGQTWIMIQEHVKSFSWGIDPYDKPNTIYIERHEPSGYSTVFRSTDFFQSRENQEVILEEVRDFQLRDKYMFATKVVHLLGSEQQSSVQLWVSFGRKPMRAAQFVTRHPINEYYIADASEDQVFVCVSHSNNRTNLYISEAEGLKFSLSLENVLYYSPGGAGSDTLVRYFANEPFADFHRVEGLQGVYIATLINGSMNEENMRSVITFDKGGTWEFLQAPAFTGYGEKINCELSQGCSLHLAQRLSQLLNLQLRRMPILSKESAPGLIIATGSVGKNLASKTNVYISSSAGARWREALPGPHYYTWGDHGGIITAIAQGMETNELKYSTNEGETWKTFIFSEKPVFVYGLLTEPGEKSTVFTIFGSNKENVHSWLILQVNATDALGVPCTENDYKLWSPSDERGNECLLGHKTVFKRRTPHATCFNGEDFDRPVVVSNCSCTREDYECDFGFKMSEDLSLEVCVPDPEFSGKSYSPPVPCPVGSTYRRTRGYRKISGDTCSGGDVEARLEGELVPCPLAEENEFILYAVRKSIYRYDLASGATEQLPLTGLRAAVALDFDYEHNCLYWSDLALDVIQRLCLNGSTGQEVIINSGLETVEALAFEPLSQLLYWVDAGFKKIEVANPDGDFRLTIVNSSVLDRPRALVLVPQEGVMFWTDWGDLKPGIYRSNMDGSAAYHLVSEDVKWPNGISVDDQWIYWTDAYLECIERITFSGQQRSVILDNLPHPYAIAVFKNEIYWDDWSQLSIFRASKYSGSQMEILANQLTGLMDMKIFYKGKNTGSNACVPRPCSLLCLPKANNSRSCRCPEDVSSSVLPSGDLMCDCPQGYQLKNNTCVKQENTCLRNQYRCSNGNCINSIWWCDFDNDCGDMSDERNCPTTICDLDTQFRCQESGTCIPLSYKCDLEDDCGDNSDESHCEMHQCRSDEYNCSSGMCIRSSWVCDGDNDCRDWSDEANCTAIYHTCEASNFQCRNGHCIPQRWACDGDTDCQDGSDEDPVNCEKKCNGFRCPNGTCIPSSKHCDGLRDCSDGSDEQHCEPLCTHFMDFVCKNRQQCLFHSMVCDGIIQCRDGSDEDAAFAGCSQDPEFHKVCDEFGFQCQNGVCISLIWKCDGMDDCGDYSDEANCENPTEAPNCSRYFQFRCENGHCIPNRWKCDRENDCGDWSDEKDCGDSHILPFSTPGPSTCLPNYYRCSSGTCVMDTWVCDGYRDCADGSDEEACPLLANVTAASTPTQLGRCDRFEFECHQPKTCIPNWKRCDGHQDCQDGRDEANCPTHSTLTCMSREFQCEDGEACIVLSERCDGFLDCSDESDEKACSDELTVYKVQNLQWTADFSGDVTLTWMRPKKMPSASCVYNVYYRVVGESIWKTLETHSNKTNTVLKVLKPDTTYQVKVQVQCLSKAHNTNDFVTLRTPEGLPDAPRNLQLSLPREAEGVIVGHWAPPIHTHGLIREYIVEYSRSGSKMWASQRAASNFTEIKNLLVNTLYTVRVAAVTSRGIGNWSDSKSITTIKGKVIPPPDIHIDSYGENYLSFTLTMESDIKVNGYVVNLFWAFDTHKQERRTLNFRGSILSHKVGNLTAHTSYEISAWAKTDLGDSPLAFEHVMTRGVRPPAPSLKAKAINQTAVECTWTGPRNVVYGIFYATSFLDLYRNPKSLTTSLHNKTVIVSKDEQYLFLVRVVVPYQGPSSDYVVVKMIPDSRLPPRHLHVVHTGKTSVVIKWESPYDSPDQDLLYAVAVKDLIRKTDRSYKVKSRNSTVEYTLNKLEPGGKYHIIVQLGNMSKDSSIKITTVSLSAPDALKIITENDHVLLFWKSLALKEKHFNESRGYEIHMFDSAMNITAYLGNTTDNFFKISNLKMGHNYTFTVQARCLFGNQICGEPAILLYDELGSGADASATQAARSTDVA

SEQ ID NO: 3024 - protein, 755 aa, synthetic construct
  REGION 1..755: note = SORT1 (Q99523) SP+PP+ECD
MERPWGAADGLSRWPHGLGLLLLLQLLPPSTLSQDRLDAPPPPAAPLPRWSGPIGVSWGLRAAAAGGAFPRGGRWRRSAPGEDEECGRVRDFVAKLANNTHQHVFDDLRGSVSLSWVGDSTGVILVLTTFHVPLVIMTFGQSKLYRSEDYGKNFKDITDLINNTFIRTEFGMAIGPENSGKVVLTAEVSGGSRGGRIFRSSDFAKNFVQTDLPFHPLTQMMYSPQNSDYLLALSTENGLWVSKNFGGKWEEIHKAVCLAKWGSDNTIFFTTYANGSCKADLGALELWRTSDLGKSFKTIGVKIYSFGLGGRFLFASVMADKDTTRRIHVSTDQGDTWSMAQLPSVGQEQFYSILAANDDMVFMHVDEPGDTGFGTIFTSDDRGIVYSKSLDRHLYTTTGGETDFTNVTSLRGVYITSVLSEDNSIQTMITFDQGGRWTHLRKPENSECDATAKNKNECSLHIHASYSISQKLNVPMAPLSEPNAVGIVIAHGSVGDAISVMVPDVYISDDGGYSWTKMLEGPHYYTILDSGGIIVAIEHSSRPINVIKFSTDEGQCWQTYTFTRDPIYFTGLASEPGARSMNISIWGFTESFLTSQWVSYTIDFKDILERNCEEKDYTIWLAHSTDPEDYEDGCILGYKEQFLRLRKSSVCQNGRDYVVTKQPSICLCSLEDFLCDFGYYRPENDSKCVEQPELKGHDLEFCLYGREEHLTTNGYRKIPGDKCQGGVNPVREVKDLKKKCTSNFLSPEKQNSKSN

SEQ ID NO: 3025 - protein, 221 aa, synthetic construct
  REGION 1..221: note = SPACA1 (Q9HBV2) SP+PP+ECD
MSPRGTGCSAGLLMTVGWLLLAGLQSARGTNVTAAVQDAGLAHEGEGEEETENNDSETAENYAPPETEDVSNRNVVKEVEFGMCTVTCGIGVREVILTNGCPGGESKCVVRVEECRGPTDCGWGKPISESLESVRLACIHTSPLNRFKYMWKLLRQDQQSIILVNDSAILEVRKESHPLAFECDTLDNNEIVATIKFTVYTSSELQMRRSSLPATDAALIF

SEQ ID NO: 3026 - protein, 197 aa, synthetic construct
  REGION 1..197: note = SPINT2 (O43291) SP+PP+ECD
MAQLCGLRRSRAFLALLGSLLLSGVLAADRERSIHDFCLVSKVVGRCRASMPRWWYNVTDGSCQLFVYGGCDGNSNNYLTKEECLKKCATVTENATGDLATSRNAADSSVPSAPRRQDSEDHSSDMFNYEEYCTANAVTGPCRASFPRWYFDVERNSCNNFIYGGCRGNKNSYRSEEACMLRCFRQQENPPLPLGSK

SEQ ID NO: 3027 - protein, 253 aa, synthetic construct
  REGION 1..253: note = SPN (P16150) SP+PP+ECD
MATLLLLLGVLVVSPDALGSTTAVQTPTSGEPLVSTSEPLSSKMYTTSITSDPKADSTGDQTSALPPSTSINEGSPLWTSIGASTGSPLPEPTTYQEVSIKMSSVPQETPHATSHPAVPITANSLGSHTVTGGTITTNSPETSSRTSGAPVTTAASSLETSRGTSGPPLTMATVSLETSKGTSGPPVTMATDSLETSTGTTGPPVTMTTGSLEPSSGASGPQVSSVKLSTMMSPTTSTNASTVPFRNPDENSR

SEQ ID NO: 3028 - protein, 207 aa, synthetic construct
  REGION 1..207: note = SSR1 (P43307) SP+PP+ECD
MRLLPRLLLLLLLVFPATVLFRGGPRGLLAVAQDLTEDEETVEDSIIEDEDDEAEVEEDEPTDLVEDKEEEDVSGEPEASPSADTTILFVKGEDFPANNIVKFLVGFTNKGTEDFIVESLDASFRYPQDYQFYIQNFTALPLNTVVPPQRQATFEYSFIPAEPMGGRPFGLVINLNYKDLNGNVFQDAVFNQTVTVIEREDGLDGET

SEQ ID NO: 3029 - protein, 2478 aa, synthetic construct
  REGION 1..2478: note = STAB1 (Q9NY15) SP+PP+ECD
MAGPRGLLPLCLLAFCLAGFSFVRGQVLFKGCDVKTTFVTHVPCTSCAAIKKQTCPSGWLRELPDQITQDCRYEVQLGGSMVSMSGCRRKCRKQVVQKACCPGYWGSRCHECPGGAETPCNGHGTCLDGMDRNGTCVCQENFRGSACQECQDPNRFGPDCQSVCSCVHGVCNHGPRGDGSCLCFAGYTGPHCDQELPVCQELRCPQNTQCSAEAPSCRCLPGYTQQGSECRAPNPCWPSPCSLLAQCSVSPKGQAQCHCPENYHGDGMVCLPKDPCTDNLGGCPSNSTLCVYQKPGQAFCTCRPGLVSINSNASAGCFAFCSPFSCDRSATCQVTADGKTSCVCRESEVGDGRACYGHLLHEVQKATQTGRVFLQLRVAVAMMDQGCREILTTAGPFTVLVPSVSSFSSRTMNASLAQQLCRQHIIAGQHILEDTRTQQTRRWWTLAGQEITVTFNQFTKYSYKYKDQPQQTFNIYKANNIAANGVFHVVTGLRWQAPSGTPGDPKRTIGQILASTEAFSRFETILENCGLPSILDGPGPFTVFAPSNEAVDSLRDGRLIYLFTAGLSKLQELVRYHIYNHGQLTVEKLISKGRILTMANQVLAVNISEEGRILLGPEGVPLQRVDVMAANGVIHMLDGILLPPTILPILPKHCSEEQHKIVAGSCVDCQALNTSTCPPNSVKLDIFPKECVYIHDPTGLNVLKKGCASYCNQTIMEQGCCKGFFGPDCTQCPGGFSNPCYGKGNCSDGIQGNGACLCFPDYKGIACHICSNPNKHGEQCQEDCGCVHGLCDNRPGSGGVCQQGTCAPGFSGRFCNESMGDCGPTGLAQHCHLHARCVSQEGVARCRCLDGFEGDGFSCTPSNPCSHPDRGGCSENAECVPGSLGTHHCTCHKGWSGDGRVCVAIDECELDMRGGCHTDALCSYVGPGQSRCTCKLGFAGDGYQCSPIDPCRAGNGGCHGLATCRAVGGGQRVCTCPPGFGGDGFSCYGDIFRELEANAHFSIFYQWLKSAGITLPADRRVTALVPSEAAVRQLSPEDRAFWLQPRTLPNLVRAHFLQGALFEEELARLGGQEVATLNPTTRWEIRNISGRVWVQNASVDVADLLATNGVLHILSQVLLPPRGDVPGGQGLLQQLDLVPAFSLFRELLQHHGLVPQIEAATAYTIFVPTNRSLEAQGNSSHLDADTVRHHVVLGEALSMETLRKGGHRNSLLGPAHWIVFYNHSGQPEVNHVPLEGPMLEAPGRSLIGLSGVLTVGSSRCLHSHAEALREKCVNCTRRFRCTQGFQLQDTPRKSCVYRSGFSFSRGCSYTCAKKIQVPDCCPGFFGTLCEPCPGGLGGVCSGHGQCQDRFLGSGECHCHEGFHGTACEVCELGRYGPNCTGVCDCAHGLCQEGLQGDGSCVCNVGWQGLRCDQKITSPQCPRKCDPNANCVQDSAGASTCACAAGYSGNGIFCSEVDPCAHGHGGCSPHANCTKVAPGQRTCTCQDGYMGDGELCQEINSCLIHHGGCHIHAECIPTGPQQVSCSCREGYSGDGIRTCELLDPCSKNNGGCSPYATCKSTGDGQRTCTCDTAHTVGDGLTCRARVGLELLRDKHASFFSLRLLEYKELKGDGPFTIFVPHADLMSNLSQDELARIRAHRQLVFRYHVVGCRRLRSEDLLEQGYATALSGHPLRFSEREGSIYLNDFARVVSSDHEAVNGILHFIDRVLLPPEALHWEPDDAPIPRRNVTAAAQGFGYKIFSGLLKVAGLLPLLREASHRPFTMLWPTDAAFRALPPDRQAWLYHEDHRDKLAAILRGHMIRNVEALASDLPNLGPLRTMHGTPISFSCSRTRAGELMVGEDDARIVQRHLPFEGGLAYGIDQLLEPPGLGARCDHFETRPLRLNTCSICGLEPPCPEGSQEQGSPEACWRFYPKFWTSPPLHSLGLRSVWVHPSLWGRPQGLGRGCHRNCVTTTWKPSCCPGHYGSECQACPGGPSSPCSDRGVCMDGMSGSGQCLCRSGFAGTACELCAPGAFGPHCQACRCTVHGRCDEGLGGSGSCFCDEGWTGPRCEVQLELQPVCTPPCAPEAVCRAGNSCECSLGYEGDGRVCTVADLCQDGHGGCSEHANCSQVGTMVTCTCLPDYEGDGWSCRARNPCTDGHRGGCSEHANCLSTGLNTRRCECHAGYVGDGLQCLEESEPPVDRCLGQPPPCHSDAMCTDLHFQEKRAGVFHLQATSGPYGLNFSEAEAACEAQGAVLASFPQLSAAQQLGFHLCLMGWLANGSTAHPVVFPVADCGNGRVGIVSLGARKNLSERWDAYCFRVQDVACRCRNGFVGDGISTCNGKLLDVLAATANFSTFYGMLLGYANATQRGLDFLDFLDDELTYKTLFVPVNEGFVDNMTLSGPDLELHASNATLLSANASQGKLLPAHSGLSLIISDAGPDNSSWAPVAPGTVVVSRIIVWDIMAFNGIIHALASPLLAPPQPQAVLAPEAPPVAA

SEQ ID NO: 3030 - protein, 2458 aa, synthetic construct
  REGION 1..2458: note = STAB2 (Q8WWQ8) SP+PP+ECD
MMLQHLVIFCLGLVVQNFCSPAETTGQARRCDRKSLLTIRTECRSCALNLGVKCPDGYTMITSGSVGVRDCRYTFEVRTYSLSLPGCRHICRKDYLQPRCCPGRWGPDCIECPGGAGSPCNGRGSCAEGMEGNGTCSCQEGFGGTACETCADDNLFGPSCSSVCNCVHGVCNSGLDGDGTCECYSAYTGPKCDKPIPECAALLCPENSRCSPSTEDENKLECKCLPNYRGDGKYCDPINPCLRKICHPHAHCTYLGPNRHSCTCQEGYRGDGQVCLPVDPCQINFGNCPTKSTVCKYDGPGQSHCECKEHYQNFVPGVGCSMTDICKSDNPCHRNANCTTVAPGRTECICQKGYVGDGLTCYGNIMERLRELNTEPRGKWQGRLTSFISLLDKAYAWPLSKLGPFTVLLPTDKGLKGFNVNELLVDNKAAQYFVKLHIIAGQMNIEYMNNTDMFYTLTGKSGEIFNSDKDNQIKLKLHGGKKKVKIIQGDIIASNGLLHILDRAMDKLEPTFESNNEQTIMTMLQPRYSKFRSLLEETNLGHALDEDGVGGPYTIFVPNNEALNNMKDGTLDYLLSPEGSRKLLELVRYHIVPFTQLEVATLISTPHIRSMANQLIQFNTTDNGQILANDVAMEEIEITAKNGRIYTLTGVLIPPSIVPILPHRCDETKREMKLGTCVSCSLVYWSRCPANSEPTALFTHRCVYSGRFGSLKSGCARYCNATVKIPKCCKGFYGPDCNQCPGGFSNPCSGNGQCADSLGGNGTCICEEGFQGSQCQFCSDPNKYGPRCNKKCLCVHGTCNNRIDSDGACLTGTCRDGSAGRLCDKQTSACGPYVQFCHIHATCEYSNGTASCICKAGYEGDGTLCSEMDPCTGLTPGGCSRNAECIKTGTGTHTCVCQQGWTGNGRDCSEINNCLLPSAGGCHDNASCLYVGPGQNECECKKGFRGNGIDCEPITSCLEQTGKCHPLASCQSTSSGVWSCVCQEGYEGDGFLCYGNAAVELSFLSEAAIFNRWINNASLQPTLSATSNLTVLVPSQQATEDMDQDEKSFWLSQSNIPALIKYHMLLGTYRVADLQTLSSSDMLATSLQGNFLHLAKVDGNITIEGASIVDGDNAATNGVIHIINKVLVPQRRLTGSLPNLLMRLEQMPDYSIFRGYIIQYNLANAIEAADAYTVFAPNNNAIENYIREKKVLSLEEDVLRYHVVLEEKLLKNDLHNGMHRETMLGFSYFLSFFLHNDQLYVNEAPINYTNVATDKGVIHGLGKVLEIQKNRCDNNDTTIIRGRCRTCSSELTCPFGTKSLGNEKRRCIYTSYFMGRRTLFIGCQPKCVRTVITRECCAGFFGPQCQPCPGNAQNVCFGNGICLDGVNGTGVCECGEGFSGTACETCTEGKYGIHCDQACSCVHGRCNQGPLGDGSCDCDVGWRGVHCDNATTEDNCNGTCHTSANCLTNSDGTASCKCAAGFQGNGTICTAINACEISNGGCSAKADCKRTTPGRRVCTCKAGYTGDGIVCLEINPCLENHGGCDKNAECTQTGPNQAACNCLPAYTGDGKVCTLINVCLTKNGGCSEFAICNHTGQVERTCTCKPNYIGDGFTCRGSIYQELPKNPKTSQYFFQLQEHFVKDLVGPGPFTVFAPLSAAFDEEARVKDWDKYGLMPQVLRYHVVACHQLLLENLKLISNATSLQGEPIVISVSQSTVYINNKAKIISSDIISTNGIVHIIDKLLSPKNLLITPKDNSGRILQNLTTLATNNGYIKFSNLIQDSGLLSVITDPIHTPVTLFWPTDQALHALPAEQQDFLFNQDNKDKLKEYLKFHVIRDAKVLAVDLPTSTAWKTLQGSELSVKCGAGRDIGDLFLNGQTCRIVQRELLFDLGVAYGIDCLLIDPTLGGRCDTFTTFDASGECGSCVNTPSCPRWSKPKGVKQKCLYNLPFKRNLEGCRERCSLVIQIPRCCKGYFGRDCQACPGGPDAPCNNRGVCLDQYSATGECKCNTGFNGTACEMCWPGRFGPDCLPCGCSDHGQCDDGITGSGQCLCETGWTGPSCDTQAVLPAVCTPPCSAHATCKENNTCECNLDYEGDGITCTVVDFCKQDNGGCAKVARCSQKGTKVSCSCQKGYKGDGHSCTEIDPCADGLNGGCHEHATCKMTGPGKHKCECKSHYVGDGLNCEPEQLPIDRCLQDNGQCHADAKCVDLHFQDTTVGVFHLRSPLGQYKLTFDKAREACANEAATMATYNQLSYAQKAKYHLCSAGWLETGRVAYPTAFASQNCGSGVVGIVDYGPRPNKSEMWDVFCYRMKDVNCTCKVGYVGDGFSCSGNLLQVLMSFPSLTNFLTEVLAYSNSSARGRAFLEHLTDLSIRGTLFVPQNSGLGENETLSGRDIEHHLANVSMFFYNDLVNGTTLQTRLGSKLLITASQDPLQPTETRFVDGRAILQWDIFASNGIIHVISRPLKAPPAPVTLTHT

SEQ ID NO: 3031 - protein, 213 aa, synthetic construct
  REGION 1..213: note = STIM1 (Q13586) SP+PP+ECD
MDVCVRLALWLLWGLLLHQGQSLSHSHSEKATGTSSGANSEESTAAEFCRIDKPLCHSEDEKLSFEAVRNIHKLMDDDANGDVDVEESDEFLREDLNYHDPTVKHSTFHGEDKLISVEDLWKAWKSSEVYNWTVDEVVQWLITYVELPQYEETFRKLQLSGHAMPRLAVTNTTMTGTVLKMTDRSHRQKLQLKALDTVLFGPPLLTRHNHLKD

SEQ ID NO: 3032 - protein, 1010 aa, synthetic construct
  REGION 1..1010: note = SUCO (Q9UBS9) SP+PP+ECD
MKKHRRALALVSCLFLCSLVWLPSWRVCCKESSSASASSYYSQDDNCALENEDVQFQKKDEREGPINAESLGKSGSNLPISPKEHKLKDDSIVDVQNTESKKLSPPVVETLPTVDLHEESSNAVVDSETVENISSSSTSEITPISKLDEIEKSGTIPIAKPSETEQSETDCDVGEALDASAPIEQPSFVSPPDSLVGQHIENVSSSHGKGKITKSEFESKVSASEQGGGDPKSALNASDNLKNESSDYTKPGDIDPTSVASPKDPEDIPTFDEWKKKVMEVEKEKSQSMHASSNGGSHATKKVQKNRNNYASVECGAKILAANPEAKSTSAILIENMDLYMLNPCSTKIWFVIELCEPIQVKQLDIANYELFSSTPKDFLVSISDRYPTNKWIKLGTFHGRDERNVQSFPLDEQMYAKYVKMFIKYIKVELLSHFGSEHFCPLSLIRVFGTSMVEEYEEIADSQYHSERQELFDEDYDYPLDYNTGEDKSSKNLLGSATNAILNMVNIAANILGAKTEDLTEGNKSISENATATAAPKMPESTPVSTPVPSPEYVTTEVHTHDMEPSTPDTPKESPIVQLVQEEEEEASPSTVTLLGSGEQEDESSPWFESETQIFCSELTTICCISSFSEYIYKWCSVRVALYRQRSRTALSKGKDYLVLAQPPLLLPAESVDVSVLQPLSGELENTNIEREAETVVLGDLSSSMHQDDLVNHTVDAVELEPSHSQTLSQSLLLDITPEINPLPKIEVSESVEYEAGHIPSPVIPQESSVEIDNETEQKSESFSSIEKPSITYETNKVNELMDNIIKEDVNSMQIFTKLSETIVPPINTATVPDNEDGEAKMNIADTAKQTLISVVDSSSLPEVKEEEQSPEDALLRGLQRTATDFYAELQNSTDLGYANGNLVHGSNQKESVFMRLNNRIKALEVNMSLSGRYLEELSQRYRKQMEEMQKAFNKTIVKLQNTSRIAEEQDQRQTEAIQLLQAQLTNMTQLVSNLSATVAELKREVSDR

SEQ ID NO: 3033 - protein, 721 aa, synthetic construct
  REGION 1..721: note = SUSD1 (Q6UWL2) SP+PP+ECD
MGRGPWDAGPSRRLLPLLLLLGLARGAAGAPGPDGLDVCATCHEHATCQQREGKKICICNYGFVGNGRTQCVDKNECQFGATLVCGNHTSCHNTPGGFYCICLEGYRATNNNKTFIPNDGTFCTDIDECEVSGLCRHGGRCVNTHGSFECYCMDGYLPRNGPEPFHPTTDATSCTEIDCGTPPEVPDGYIIGNYTSSLGSQVRYACREGFFSVPEDTVSSCTGLGTWESPKLHCQEINCGNPPEMRHAILVGNHSSRLGGVARYVCQEGFESPGGKITSVCTEKGTWRESTLTCTEILTKINDVSLFNDTCVRWQINSRRINPKISYVISIKGQRLDPMESVREETVNLTTDSRTPEVCLALYPGTNYTVNISTAPPRRSMPAVIGFQTAEVDLLEDDGSFNISIFNETCLKLNRRSRKVGSEHMYQFTVLGQRWYLANFSHATSFNFTTREQVPVVCLDLYPTTDYTVNVTLLRSPKRHSVQITIATPPAVKQTISNISGFNETCLRWRSIKTADMEEMYLFHIWGQRWYQKEFAQEMTFNISSSSRDPEVCLDLRPGTNYNVSLRALSSELPVVISLTTQITEPPLPEVEFFTVHRGPLPRLRLRKAKEKNGPISSYQVLVLPLALQSTFSCDSEGASSFFSNASDADGYVAAELLAKDVPDDAMEIPIGDRLYYGEYYNAPLKRGSDYCIILRITSEWNKVRRHSCAVWAQVKDSSLM

SEQ ID NO: 3034 - protein, 785 aa, synthetic construct
  REGION 1..785: note = SUSD2 (Q9UGT4) SP+PP+ECD
MKPALLPWALLLLATALGPGPGPTADAQESCSMRCGALDGPCSCHPTCSGLGTCCLDFRDFCLEILPYSGSMMGGKDFVVRHFKMSSPTDASVICRFKDSIQTLGHVDSSGQVHCVSPLLYESGRIPFTVSLDNGHSFPRAGTWLAVHPNKVSMMEKSELVNETRWQYYGTANTSGNLSLTWHVKSLPTQTITIELWGYEETGMPYSQEWTAKWSYLYPLATHIPNSGSFTFTPKPAPPSYQRWRVGALRIIDSKNYAGQKDVQALWTNDHALAWHLSDDFREDPVAWARTQCQAWEELEDQLPNFLEELPDCPCTLTQARADSGRFFTDYGCDMEQGSVCTYHPGAVHCVRSVQASLRYGSGQQCCYTADGTQLLTADSSGGSTPDRGHDWGAPPFRTPPRVPSMSHWLYDVLSFYYCCLWAPDCPRYMQRRPSNDCRNYRPPRLASAFGDPHFVTFDGTNFTFNGRGEYVLLEAALTDLRVQARAQPGTMSNGTETRGTGLTAVAVQEGNSDVVEVRLANRTGGLEVLLNQEVLSFTEQSWMDLKGMFLSVAAGDRVSIMLASGAGLEVSVQGPFLSVSVLLPEKFLTHTHGLLGTLNNDPTDDFTLHSGRVLPPGTSPQELFLFGANWTVHNASSLLTYDSWFLVHNFLYQPKHDPTFEPLFPSETTLNPSLAQEAAKLCGDDHFCNFDVAATGSLSTGTATRVAHQLHQRRMQSLQPVVSCGWLAPPPNGQKEGNRYLAGSTIYFHCDNGYSLAGAETSTCQADGTWSSPTPKCQPGRSYA

SEQ ID NO: 3035 - protein, 319 aa, synthetic construct
  REGION 1..319: note = SUSD4 (Q5VX71) SP+PP+ECD
MYHGMNPSNGDGFLEQQQQQQQPQSPQRLLAVILWFQLALCFGPAQLTGGFDDLQVCADPGIPENGFRTPSGGVFFEGSVARFHCQDGFKLKGATKRLCLKHFNGTLGWIPSDNSICVQEDCRIPQIEDAEIHNKTYRHGEKLIITCHEGFKIRYPDLHNMVSLCRDDGTWNNLPICQGCLRPLASSNGYVNISELQTSFPVGTVISYRCFPGFKLDGSAYLECLQNLIWSSSPPRCLALEVCPLPPMVSHGDFVCHPRPCERYNHGTVVEFYCDPGYSLTSDYKYITCQYGEWFPSYQVYCIKSEQTWPSTHETLLTT

SEQ ID NO: 3036 - protein, 574 aa, synthetic construct
  REGION 1..574: note = SUSD5 (O60279) SP+PP+ECD
MTAEGPSPPARWHRRLPGLWAAALLLLGLPRLSVRADGKFFVLESQNGSQGLQLEAARLSCKSRGAHLASADELRRVVQDCSFAVCTTGWLADGTLGTTVCSKGSGEQQIMRAVDVRIESNPVPGGTYSALCIKDEEKPCGDPPSFPHTILQGRTGLEMGDELLYVCAPGHIMGHRETAFTLLCNSCGEWYGLVQACGKDEAEAHIDYEDNFPDDRSVSFRELMEDSRTEADEDRGQGDSSEEAPKQDRLVSISVGRENIARDKVFVPTTGLPGAGSSVPADSPGSRLLQKHLFWFPAEAFHKPGLEKEVDDDTKKQFSAGDNHSGVKLVPGEPETKVIYGNTDGPSGPFVGKNDSKAGDPVVSSSDESWLDGYPVTEGAWRKTEAEEEEDGDRGDGSVGLDENVLVTPDQPILVEVKKPKSSTLTPSEGMTHSSVLPSQMLDVEALALRPVNASETEGIGDGDLTKYQSTLPWRFITEESPMATLSYELTSSTLEILTVNTVKQTPNHIPSTIMATTQPPVETTVPEIQDSFPYLLSEDFFGQEGPGPGASEELHPTLESCVGDGCPGLSRGP

SEQ ID NO: 3037 - protein, 274 aa, synthetic construct
  REGION 1..274: note = TACSTD2 (P09758) SP+PP+ECD
MARGPGLAPPPLRLPLLLLVLAAVTGHTAAQDNCTCPTNKMTVCSPDGPGGRCQCRALGSGMAVDCSTLTSKCLLLKARMSAPKNARTLVRPSEHALVDNDGLYDPDCDPEGRFKARQCNQTSVCWCVNSVGVRRTDKGDLSLRCDELVRTHHILIDLRHRPTAGAFNHSDLDAELRRLFRERYRLHPKFVAAVHYEQPTIQIELRQNTSQKAAGDVDIGDAAYYFERDIKGESLFQGRGGLDLRVRGEPLQVERTLIYYLDEIPPKFSMKRLT

SEQ ID NO: 3038 - protein, 236 aa, synthetic construct
  REGION 1..236: note = TARM1 (B6A8C7) SP+PP+ECD
MIPKLLSLLCFRLCVGQGDTRGDGSLPKPSLSAWPSSVVPANSNVTLRCWTPARGVSFVLRKGGIILESPKPLDSTEGAAEFHLNNLKVRNAGEYTCEYYRKASPHILSQRSDVLLLLVTGHLSKPFLRTYQRGTVTAGGRVTLQCQKRDQLFVPIMFALLKAGTPSPIQLQSPAGKEIDFSLVDVTAGDAGNYSCMYYQTKSPFWASEPSDQLEILVTVPPGTTSSNYSLGNFVR

SEQ ID NO: 3039 - protein, 668 aa, synthetic construct
  REGION 1..668: note = TCTN2 (Q96GX1) SP+PP+ECD
MGFQPPAALLLRLFLLQGILRLLWGDLAFIPPFIRMSGPAVSASLVGDTEGVTVSLAVLQDEAGILPIPTCGVLNNETEDWSVTVIPGAKVLEVTVRWKRGLDWCSSNETDSFSESPCILQTLLVSASHNSSCSAHLLIQVEIYANSSLTHNASENVTVIPNQVYQPLGPCPCNLTAGACDVRCCCDQECSSNLTTLFRRSCFTGVFGGDVNPPFDQLCSAGTTTRGVPDWFPFLCVQSPLANTPFLGYFYHGAVSPKQDSSFEVYVDTDAKDFADFGYKQGDPIMTVKKAYFTIPQVSLAGQCMQNAPVAFLHNFDVKCVTNLELYQERDGIINAKIKNVALGGIVTPKVIYEEATDLDKFITNTETPLNNGSTPRIVNVEEHYIFKWNNNTISEINVKIFRAEINAHQKGIMTQRFVVKFLSYNSGNEEELSGNPGYQLGKPVRALNINRMNNVTTLHLWQSAGRGLCTSATFKPILFGENVLSGCLLEVGINENCTQLRENAVERLDSLIQATHVAMRGNSDYADLSDGWLEIIRVDAPDPGADPLASSVNGMCLDIPAHLSIRILISDAGAVEGITQQEILGVETRFSSVNWQYQCGLTCEHKADLLPISASVQFIKIPAQLPHPLTRFQINYTEYDCNRNEVCWPQLLYPWTQYYQGELHSQC

SEQ ID NO: 3040 - protein, 581 aa, synthetic construct
  REGION 1..581: note = TCTN3 (Q6NUS6) SP+PP+ECD
MRTPQLALLQVFFLVFPDGVRPQPSSSPSGAVPTSLELQRGTDGGTLQSPSEATATRPAVPGLPTVVPTLVTPSAPGNRTVDLFPVLPICVCDLTPGACDINCCCDRDCYLLHPRTVFSFCLPGSVRSSSWVCVDNSVIFRSNSPFPSRVFMDSNGIRQFCVHVNNSNLNYFQKLQKVNATNFQALAAEFGGESFTSTFQTQSPPSFYRAGDPILTYFPKWSVISLLRQPAGVGAGGLCAESNPAGFLESKSTTCTRFFKNLASSCTLDSALNAASYYNFTVLKVPRSMTDPQNMEFQVPVILTSQANAPLLAGNTCQNVVSQVTYEIETNGTFGIQKVSVSLGQTNLTVEPGASLQQHFILRFRAFQQSTAASLTSPRSGNPGYIVGKPLLALTDDISYSMTLLQSQGNGSCSVKRHEVQFGVNAISGCKLRLKKADCSHLQQEIYQTLHGRPRPEYVAIFGNADPAQKGGWTRILNRHCSISAINCTSCCLIPVSLEIQVLWAYVGLLSNPQAHVSGVRFLYQCQSIQDSQQVTEVSLTTLVNFVDITQKPQPPRGQPKMDWKWPFDFFPFKVAFSRGV

SEQ ID NO: 3041 - protein, 748 aa, synthetic construct
  REGION 1..748: note = TEK (Q02763) SP+PP+ECD
MDSLASLVLCGVSLLLSGTVEGAMDLILINSLPLVSDAETSLTCIASGWRPHEPITIGRDFEALMNQHQDPLEVTQDVTREWAKKVVWKREKASKINGAYFCEGRVRGEAIRIRTMKMRQQASFLPATLTMTVDKGDNVNISFKKVLIKEEDAVIYKNGSFIHSVPRHEVPDILEVHLPHAQPQDAGVYSARYIGGNLFTSAFTRLIVRRCEAQKWGPECNHLCTACMNNGVCHEDTGECICPPGFMGRTCEKACELHTFGRTCKERCSGQEGCKSYVFCLPDPYGCSCATGWKGLQCNEACHPGFYGPDCKLRCSCNNGEMCDRFQGCLCSPGWQGLQCEREGIQRMTPKIVDLPDHIEVNSGKFNPICKASGWPLPTNEEMTLVKPDGTVLHPKDFNHTDHFSVAIFTIHRILPPDSGVWVCSVNTVAGMVEKPFNISVKVLPKPLNAPNVIDTGHNFAVINISSEPYFGDGPIKSKKLLYKPVNHYEAWQHIQVTNEIVTLNYLEPRTEYELCVQLVRRGEGGEGHPGPVRRFTTASIGLPPPRGLNLLPKSQTTLNLTWQPIFPSSEDDFYVEVERRSVQKSDQQNIKVPGNLTSVLLNNLHPREQYVVRARVNTKAQGEWSEDLTAWTLSDILPPQPENIKISNITHSSAVISWTILDGYSISSITIRYKVQGKNEDQHVDVKIKNATITQYQLKGLEPETAYQVDIFAENNIGSSNPAFSHELVTLPESQAPADLGGGKMLL

SEQ ID NO: 3042 - protein, 98 aa, synthetic construct
  REGION 1..98: note = TGFA (P01135) SP+PP+ECD
MVPSAGQLALFALGIVLAACQALENSTSPLSADPPVAAAVVSHFNDCPDSHTQFCFHGTCRFLVQEDKPACVCHSGYVGARCEHADLLAVVAASQKKQ

SEQ ID NO: 3043 - protein, 126 aa, synthetic construct
  REGION 1..126: note = TGFBR1 (P36897) SP+PP+ECD
MEAAVAAPRPRLLLLVLAAAAAAAAALLPGATALQCFCHLCTKDNFTCVTDGLCFVSVTETTDKVIHNSMCIAEIDLIPRDRPFVCAPSSKTGSVTTTYCCNQDHCNKIELPTTVKSSPGLGPVEL

SEQ ID NO: 3044 - protein, 166 aa, synthetic construct
  REGION 1..166: note = TGFBR2 (P37173) SP+PP+ECD
MGRGLLRGLWPLHIVLWTRIASTIPPHVQKSVNNDMIVTDNNGAVKFPQLCKFCDVRFSTCDNQKSCMSNCSITSICEKPQEVCVAVWRKNDENITLETVCHDPKLPYHDFILEDAASPKCIMKEKKKPGETFFMCSCSSDECNDNIIFSEEYNTSNPDLLLVIFQ

SEQ ID NO: 3045 - protein, 787 aa, synthetic construct
  REGION 1..787: note = TGFBR3 (Q03167) SP+PP+ECD
MTSHYVIAIFALMSSCLATAGPEPGALCELSPVSASHPVQALMESFTVLSGCASRGTTGLPQEVHVLNLRTAGQGPGQLQREVTLHLNPISSVHIHHKSVVFLLNSPHPLVWHLKTERLATGVSRLFLVSEGSVVQFSSANFSLTAETEERNFPHGNEHLLNWARKEYGAVTSFTELKIARNIYIKVGEDQVFPPKCNIGKNFLSLNYLAEYLQPKAAEGCVMSSQPQNEEVHIIELITPNSNPYSAFQVDITIDIRPSQEDLEVVKNLILILKCKKSVNWVIKSFDVKGSLKIIAPNSIGFGKESERSMTMTKSIRDDIPSTQGNLVKWALDNGYSPITSYTMAPVANRFHLRLENNAEEMGDEEVHTIPPELRILLDPGALPALQNPPIRGGEGQNGGLPFPFPDISRRVWNEEGEDGLPRPKDPVIPSIQLFPGLREPEEVQGSVDIALSVKCDNEKMIVAVEKDSFQASGYSGMDVTLLDPTCKAKMNGTHFVLESPLNGCGTRPRWSALDGVVYYNSIVIQVPALGDSSGWPDGYEDLESGDNGFPGDMDEGDASLFTRPEIVVFNCSLQQVRNPSSFQEQPHGNITFNMELYNTDLFLVPSQGVFSVPENGHVYVEVSVTKAEQELGFAIQTCFISPYSNPDRMSHYTIIENICPKDESVKFYSPKRVHFPIPQADMDKKRFSFVFKPVFNTSLLFLQCELTLCTKMEKHPQKLPKCVPPDEACTSLDASIIWAMMQNKKTFTKPLAVIHHEAESKEKGPSMKEPNPISPPIFHGLDTLTV

SEQ ID NO: 3046 - protein, 381 aa, synthetic construct
  REGION 1..381: note = TGOLN2 (O43493) SP+PP+ECD
MRFVVALVLLNVAAAGAVPLLATESVKQEEAGVRPSAGNVSTHPSLSQRPGGSTKSHPEPQTPKDSPSKSSAEAQTPEDTPNKSGAEAKTQKDSSNKSGAEAKTQKGSTSKSGSEAQTTKDSTSKSHPELQTPKDSTGKSGAEAQTPEDSPNRSGAEAKTQKDSPSKSGSEAQTTKDVPNKSGADGQTPKDGSSKSGAEDQTPKDVPNKSGAEKQTPKDGSNKSGAEEQGPIDGPSKSGAEEQTSKDSPNKVVPEQPSRKDHSKPISNPSDNKELPKADTNQLADKGKLSPHAFKTESGEETDLISPPQEEVKSSEPTEDVEPKEAEDDDTGPEEGSPPKEEKEKMSGSASSENREGTLSDSTGSEKDDLYPNGSGNGSAE

SEQ ID NO: 3047 - protein, 515 aa, synthetic construct
  REGION 1..515: note = THBD (P07204) SP+PP+ECD
MLGVLVLGALALAGLGFPAPAEPQPGGSQCVEHDCFALYPGPATFLNASQICDGLRGHLMTVRSSVAADVISLLLNGDGGVGRRRLWIGLQLPPGCGDPKRLGPLRGFQWVTGDNNTSYSRWARLDLNGAPLCGPLCVAVSAAEATVPSEPIWEEQQCEVKADGFLCEFHFPATCRPLAVEPGAAAAAVSITYGTPFAARGADFQALPVGSSAAVAPLGLQLMCTAPPGAVQGHWAREAPGAWDCSVENGGCEHACNAIPGAPRCQCPAGAALQADGRSCTASATQSCNDLCEHFCVPNPDQPGSYSCMCETGYRLAADQHRCEDVDDCILEPSPCPQRCVNTQGGFECHCYPNYDLVDGECVEPVDPCFRANCEYQCQPLNQTSYLCVCAEGFAPIPHEPHRCQMFCNQTACPADCDPNTQASCECPEGYILDDGFICTDIDECENGGFCSGVCHNLPGTFECICGPDSALARHIGTDCDSGKVDGGDSGSGEPPPSPTPGSTLTPPAVGLVHS

SEQ ID NO: 3048 - protein, 413 aa, synthetic construct
  REGION 1..413: note = THSD1 (Q9NS62) SP+PP+ECD
MKPMLKDFSNLLLVVLCDYVLGEAEYLLLREPGHVALSNDTVYVDFQYFDGANGTLRNVSVLLLEANTNQTVTTKYLLTNQSQGTLKFECFYFKEAGDYWFTMTPEATDNSTPFPWWEKSAFLKVEWPVFHVDLNRSAKAAEGTFQVGLFTSQPLCPFPVDKPNIVVDVIFTNSLPEARRNSRQPLEIRTSKRTELAQGQWVEFGCAPLGPEAYVTVVLKLLGRDSVITSTGPIDLAQKFGYKLVMVPELTCESGVEVTVLPPPCTFVQGVVTVFKEAPRYPGKRTIHLAENSLPLGERRTIFNCTLFDMGKNKYCFDFGISSRSHFSAKEECMLIQRNTETWGLWQPWSQCSATCGDGVRERRRVCLTSFPSSPVCPGMSLEASLCSLEECAAFQPSSPSPLQPQGPVKSNN

SEQ ID NO: 3049 - protein, 1607 aa, synthetic construct
  REGION 1..1607: note = THSD7A (Q9UPZ6) SP+PP+ECD
MGLQARRWASGSRGAAGPRRGVLQLLPLPLPLPLLLLLLLRPGAGRAAAQGEAEAPTLYLWKTGPWGRCMGDECGPGGIQTRAVWCAHVEGWTTLHTNCKQAERPNNQQNCFKVCDWHKELYDWRLGPWNQCQPVISKSLEKPLECIKGEEGIQVREIACIQKDKDIPAEDIICEYFEPKPLLEQACLIPCQQDCIVSEFSAWSECSKTCGSGLQHRTRHVVAPPQFGGSGCPNLTEFQVCQSSPCEAEELRYSLHVGPWSTCSMPHSRQVRQARRRGKNKEREKDRSKGVKDPEARELIKKKRNRNRQNRQENKYWDIQIGYQTREVMCINKTGKAADLSFCQQEKLPMTFQSCVITKECQVSEWSEWSPCSKTCHDMVSPAGTRVRTRTIRQFPIGSEKECPEFEEKEPCLSQGDGVVPCATYGWRTTEWTECRVDPLLSQQDKRRGNQTALCGGGIQTREVYCVQANENLLSQLSTHKNKEASKPMDLKLCTGPIPNTTQLCHIPCPTECEVSPWSAWGPCTYENCNDQQGKKGFKLRKRRITNEPTGGSGVTGNCPHLLEAIPCEEPACYDWKAVRLGNCEPDNGKECGPGTQVQEVVCINSDGEEVDRQLCRDAIFPIPVACDAPCPKDCVLSTWSTWSSCSHTCSGKTTEGKQIRARSILAYAGEEGGIRCPNSSALQEVRSCNEHPCTVYHWQTGPWGQCIEDTSVSSFNTTTTWNGEASCSVGMQTRKVICVRVNVGQVGPKKCPESLRPETVRPCLLPCKKDCIVTPYSDWTSCPSSCKEGDSSIRKQSRHRVIIQLPANGGRDCTDPLYEEKACEAPQACQSYRWKTHKWRRCQLVPWSVQQDSPGAQEGCGPGRQARAITCRKQDGGQAGIHECLQYAGPVPALTQACQIPCQDDCQLTSWSKFSSCNGDCGAVRTRKRTLVGKSKKKEKCKNSHLYPLIETQYCPCDKYNAQPVGNWSDCILPEGKVEVLLGMKVQGDIKECGQGYRYQAMACYDQNGRLVETSRCNSHGYIEEACIIPCPSDCKLSEWSNWSRCSKSCGSGVKVRSKWLREKPYNGGRPCPKLDHVNQAQVYEVVPCHSDCNQYLWVTEPWSICKVTFVNMRENCGEGVQTRKVRCMQNTADGPSEHVEDYLCDPEEMPLGSRVCKLPCPEDCVISEWGPWTQCVLPCNQSSFRQRSADPIRQPADEGRSCPNAVEKEPCNLNKNCYHYDYNVTDWSTCQLSEKAVCGNGIKTRMLDCVRSDGKSVDLKYCEALGLEKNWQMNTSCMVECPVNCQLSDWSPWSECSQTCGLTGKMIRRRTVTQPFQGDGRPCPSLMDQSKPCPVKPCYRWQYGQWSPCQVQEAQCGEGTRTRNISCVVSDGSADDFSKVVDEEFCADIELIIDGNKNMVLEESCSQPCPGDCYLKDWSSWSLCQLTCVNGEDLGFGGIQVRSRPVIIQELENQHLCPEQMLETKSCYDGQCYEYKWMASAWKGSSRTVWCQRSDGINVTGGCLVMSQPDADRSCNPPCSQPHSYCSETKTCHCEEGYTEVMSSNSTLEQCTLIPVVVLPTMEDKRGDVKTSRAVHPTQPSSNPAGRGRTWFLQPFGPDGRLKTW

SEQ ID NO: 3050 - protein, 1555 aa, synthetic construct
  REGION 1..1555: note = THSD7B (Q9C0I4) SP+PP+ECD
MFPKSNLTVTCWVWRSMRKLFLLLSLLLSHAAHLEGKKDNQFIWKPGPWGRCTGDCGPGGVQSRAVWCFHVDGWTSHLSNCGESNRPPKERSCFRVCDWHSDLFQWEVSDWHHCVLVPYARGEVKPRTAECVTAQHGLQHRMVRCIQKLNRTVVANEICEHFALQPPTEQACLIPCPRDCVVSEFLPWSNCSKGCGKKLQHRTRAVIAPPLFGGLQCPNLTESRACDAPISCPLGEEEYTFSLKVGPWSKCRLPHLKEINPSGRTVLDFNSDSNERVTFKHQSYKAHHHSKSWAIEIGYQTRQVSCTRSDGQNAMLSLCLQDSFPLTVQSCIMPKDCETSQWSSWSPCSKTCRSGSLLPGFRSRSRNVKHMAIGGGKECPELLEKEACIVEGELLQQCPRYSWRTSEWKECQVSLLLEQQDPHWHVTGPVCGGGIQTREVYCAQSVPAAAALRAKEVSRPVEKALCVGPAPLPSQLCNIPCSTDCIVSSWSAWGLCIHENCHDPQGKKGFRTRQRHVLMESTGPAGHCPHLVESVPCEDPMCYRWLASEGICFPDHGKCGLGHRILKAVCQNDRGEDVSGSLCPVPPPPERKSCEIPCRMDCVLSEWTEWSSCSQSCSNKNSDGKQTRSRTILALAGEGGKPCPPSQALQEHRLCNDHSCMQLHWETSPWGPCSEDTLVTALNATIGWNGEATCGVGIQTRRVFCVKSHVGQVMTKRCPDSTRPETVRPCFLPCKKDCIVTAFSEWTPCPRMCQAGNATVKQSRYRIIIQEAANGGQECPDTLYEERECEDVSLCPVYRWKPQKWSPCILVPESVWQGITGSSEACGKGLQTRAVSCISDDNRSAEMMECLKQTNGMPLLVQECTVPCREDCTFTAWSKFTPCSTNCEATKSRRRQLTGKSRKKEKCQDSDLYPLVETELCPCDEFISQPYGNWSDCILPEGRREPHRGLRVQADSKECGEGLRFRAVACSDKNGRPVDPSFCSSSGYIQEKCVIPCPFDCKLSDWSSWGSCSSSCGIGVRIRSKWLKEKPYNGGRPCPKLDLKNQVHEAVPCYSECNQYSWVVEHWSSCKINNELRSLRCGGGTQSRKIRCVNTADGEGGAVDSNLCNQDEIPPETQSCSLMCPNECVMSEWGLWSKCPQSCDPHTMQRRTRHLLRPSLNSRTCAEDSQVQPCLLNENCFQFQYNLTEWSTCQLSENAPCGQGVRTRLLSCVCSDGKPVSMDQCEQHNLEKPQRMSIPCLVECVVNCQLSGWTAWTECSQTCGHGGRMSRTRFIIMPTQGEGRPCPTELTQEKTCPVTPCYSWVLGNWSACKLEGGDCGEGVQIRSLSCMVHSGSISHAAGRVEDALCGEMPFQDSILKQLCSVPCPGDCHLTEWSEWSTCELTCIDGRSFETVGRQSRSRTFIIQSFENQDSCPQQVLETRPCTGGKCYHYTWKASLWNNNERTVWCQRSDGVNVTGGCSPQARPAAIRQCIPACRKPFSYCTQGGVCGCEKGYTEIMKSNGFLDYCMKVPGSEDKKADVKNLSGKNRPVNSKIHDIFKGWSLQPLDPDGRVK

SEQ ID NO: 3051 - protein, 759 aa, synthetic construct
  REGION 1..759: note = TIE1 (P35590) SP+PP+ECD
MVWRVPPFLLPILFLASHVGAAVDLTLLANLRLTDPQRFFLTCVSGEAGAGRGSDAWGPPLLLEKDDRIVRTPPGPPLRLARNGSHQVTLRGFSKPSDLVGVFSCVGGAGARRTRVIYVHNSPGAHLLPDKVTHTVNKGDTAVLSARVHKEKQTDVIWKSNGSYFYTLDWHEAQDGRFLLQLPNVQPPSSGIYSATYLEASPLGSAFFRLIVRGCGAGRWGPGCTKECPGCLHGGVCHDHDGECVCPPGFTGTRCEQACREGRFGQSCQEQCPGISGCRGLTFCLPDPYGCSCGSGWRGSQCQEACAPGHFGADCRLQCQCQNGGTCDRFSGCVCPSGWHGVHCEKSDRIPQILNMASELEFNLETMPRINCAAAGNPFPVRGSIELRKPDGTVLLSTKAIVEPEKTTAEFEVPRLVLADSGFWECRVSTSGGQDSRRFKVNVKVPPVPLAAPRLLTKQSRQLVVSPLVSFSGDGPISTVRLHYRPQDSTMDWSTIVVDPSENVTLMNLRPKTGYSVRVQLSRPGEGGEGAWGPPTLMTTDCPEPLLQPWLEGWHVEGTDRLRVSWSLPLVPGPLVGDGFLLRLWDGTRGQERRENVSSPQARTALLTGLTPGTHYQLDVQLYHCTLLGPASPPAHVLLPPSGPPAPRHLHAQALSDSEIQLTWKHPEALPGPISKYVVEVQVAGGAGDPLWIDVDRPEETSTIIRGLNASTRYLFRMRASIQGLGDWSNTVEESTLGNGLQAEGPVQESRAAEEGLDQ

SEQ ID NO: 3052 - protein, 141 aa, synthetic construct
  REGION 1..141: note = TIGIT (Q495A1) SP+PP+ECD
MRWCLLLIWAQGLRQAPLASGMMTGTIETTGNISAEKGGSIILQCHLSSTTAQVTQVNWEQQDQLLAICNADLGWHISPSFKDRVAPGPGLGLTLQSLTVNDTGEYFCIYHTYPDGTYTGRIFLEVLESSVAEHGARFQIP

SEQ ID NO: 3053 - protein, 314 aa, synthetic construct
  REGION 1..314: note = TIMD4 (Q96H15) SP+PP+ECD
MSKEPLILWLMIEFWWLYLTPVTSETVVTEVLGHRVTLPCLYSSWSHNSNSMCWGKDQCPYSGCKEALIRTDGMRVTSRKSAKYRLQGTIPRGDVSLTILNPSESDSGVYCCRIEVPGWFNDVKINVRLNLQRASTTTHRTATTTTRRTTTTSPTTTRQMTTTPAALPTTVVTTPDLTTGTPLQMTTIAVFTTANTCLSLTPSTLPEEATGLLTPEPSKEGPILTAESETVLPSDSWSSVESTSADTVLLTSKESKVWDLPSTSHVSMWKTSDSVSSPQPGASDTAVPEQNKTTKTGQMDGIPMSMKNEMPISQ

SEQ ID NO: 3054 - protein, 580 aa, synthetic construct
  REGION 1..580: note = TLR1 (Q15399) SP+PP+ECD
MTSIFHFAIIFMLILQIRIQLSEESEFLVDRSKNGLIHVPKDLSQKTTILNISQNYISELWTSDILSLSKLRILIISHNRIQYLDISVFKFNQELEYLDLSHNKLVKISCHPTVNLKHLDLSFNAFDALPICKEFGNMSQLKFLGLSTTHLEKSSVLPIAHLNISKVLLVLGETYGEKEDPEGLQDFNTESLHIVFPTNKEFHFILDVSVKTVANLELSNIKCVLEDNKCSYFLSILAKLQTNPKLSNLTLNNIETTWNSFIRILQLVWHTTVWYFSISNVKLQGQLDFRDFDYSGTSLKALSIHQVVSDVFGFPQSYIYEIFSNMNIKNFTVSGTRMVHMLCPSKISPFLHLDFSNNLLTDTVFENCGHLTELETLILQMNQLKELSKIAEMTTQMKSLQQLDISQNSVSYDEKKGDCSWTKSLLSLNMSSNILTDTIFRCLPPRIKVLDLHSNKIKSIPKQVVKLEALQELNVAFNSLTDLPGCGSFSSLSVLIIDHNSVSHPSADFFQSCQKMRSIKAGDNPFQCTCELGEFVKNIDQVSSEVLEGWPDSYKCDYPESYRGTLLKDFHMSELSCNIT

SEQ ID NO: 3055 - protein, 576 aa, synthetic construct
  REGION 1..576: note = TLR10 (Q9BXR5) SP+PP+ECD
MRLIRNIYIFCSIVMTAEGDAPELPEERELMTNCSNMSLRKVPADLTPATTTLDLSYNLLFQLQSSDFHSVSKLRVLILCHNRIQQLDLKTFEFNKELRYLDLSNNRLKSVTWYLLAGLRYLDLSFNDFDTMPICEEAGNMSHLEILGLSGAKIQKSDFQKIAHLHLNTVFLGFRTLPHYEEGSLPILNTTKLHIVLPMDTNFWVLLRDGIKTSKILEMTNIDGKSQFVSYEMQRNLSLENAKTSVLLLNKVDLLWDDLFLILQFVWHTSVEHFQIRNVTFGGKAYLDHNSFDYSNTVMRTIKLEHVHFRVFYIQQDKIYLLLTKMDIENLTISNAQMPHMLFPNYPTKFQYLNFANNILTDELFKRTIQLPHLKTLILNGNKLETLSLVSCFANNTPLEHLDLSQNLLQHKNDENCSWPETVVNMNLSYNKLSDSVFRCLPKSIQILDLNNNQIQTVPKETIHLMALRELNIAFNFLTDLPGCSHFSRLSVLNIEMNFILSPSLDFVQSCQEVKTLNAGRNPFRCTCELKNFIQLETYSEVMMVGWSDSYTCEYPLNLRGTRLKDVHLHELSCNT

SEQ ID NO: 3056 - protein, 588 aa, synthetic construct
  REGION 1..588: note = TLR2 (O60603) SP+PP+ECD
MPHTLWMVWVLGVIISLSKEESSNQASLSCDRNGICKGSSGSLNSIPSGLTEAVKSLDLSNNRITYISNSDLQRCVNLQALVLTSNGINTIEEDSFSSLGSLEHLDLSYNYLSNLSSSWFKPLSSLTFLNLLGNPYKTLGETSLFSHLTKLQILRVGNMDTFTKIQRKDFAGLTFLEELEIDASDLQSYEPKSLKSIQNVSHLILHMKQHILLLEIFVDVTSSVECLELRDTDLDTFHFSELSTGETNSLIKKFTFRNVKITDESLFQVMKLLNQISGLLELEFDDCTLNGVGNFRASDNDRVIDPGKVETLTIRRLHIPRFYLFYDLSTLYSLTERVKRITVENSKVFLVPCLLSQHLKSLEYLDLSENLMVEEYLKNSACEDAWPSLQTLILRQNHLASLEKTGETLLTLKNLTNIDISKNSFHSMPETCQWPEKMKYLNLSSTRIHSVTGCIPKTLEILDVSNNNLNLFSLNLPQLKELYISRNKLMTLPDASLLPMLLVLKISRNAITTFSKEQLDSFHTLKTLEAGGNNFICSCEFLSFTQEQQALAKVLIDWPANYLCDSPSHVRGQQVQDVRLSVSECHRT

SEQ ID NO: 3057 - protein, 704 aa, synthetic construct
  REGION 1..704: note = TLR3 (O15455) SP+PP+ECD
MRQTLPCIYFWGGLLPFGMLCASSTTKCTVSHEVADCSHLKLTQVPDDLPTNITVLNLTHNQLRRLPAANFTRYSQLTSLDVGFNTISKLEPELCQKLPMLKVLNLQHNELSQLSDKTFAFCTNLTELHLMSNSIQKIKNNPFVKQKNLITLDLSHNGLSSTKLGTQVQLENLQELLLSNNKIQALKSEELDIFANSSLKKLELSSNQIKEFSPGCFHAIGRLFGLFLNNVQLGPSLTEKLCLELANTSIRNLSLSNSQLSTTSNTTFLGLKWTNLTMLDLSYNNLNVVGNDSFAWLPQLEYFFLEYNNIQHLFSHSLHGLFNVRYLNLKRSFTKQSISLASLPKIDDFSFQWLKCLEHLNMEDNDIPGIKSNMFTGLINLKYLSLSNSFTSLRTLTNETFVSLAHSPLHILNLTKNKISKIESDAFSWLGHLEVLDLGLNEIGQELTGQEWRGLENIFEIYLSYNKYLQLTRNSFALVPSLQRLMLRRVALKNVDSSPSPFQPLRNLTILDLSNNNIANINDDMLEGLEKLEILDLQHNNLARLWKHANPGGPIYFLKGLSHLHILNLESNGFDEIPVEVFKDLFELKIIDLGLNNLNTLPASVFNNQVSLKSLNLQKNLITSVEKKVFGPAFRNLTELDMRFNPFDCTCESIAWFVNWINETHTNIPELSSHYLCNTPPHYHGFPVRLFDTSSCKDSAPFEL

SEQ ID NO: 3058 - protein, 631 aa, synthetic construct
  REGION 1..631: note = TLR4 (O00206) SP+PP+ECD
MMSASRLAGTLIPAMAFLSCVRPESWEPCVEVVPNITYQCMELNFYKIPDNLPFSTKNLDLSFNPLRHLGSYSFFSFPELQVLDLSRCEIQTIEDGAYQSLSHLSTLILTGNPIQSLALGAFSGLSSLQKLVAVETNLASLENFPIGHLKTLKELNVAHNLIQSFKLPEYFSNLTNLEHLDLSSNKIQSIYCTDLRVLHQMPLLNLSLDLSLNPMNFIQPGAFKEIRLHKLTLRNNFDSLNVMKTCIQGLAGLEVHRLVLGEFRNEGNLEKFDKSALEGLCNLTIEEFRLAYLDYYLDDIIDLFNCLTNVSSFSLVSVTIERVKDFSYNFGWQHLELVNCKFGQFPTLKLKSLKRLTFTSNKGGNAFSEVDLPSLEFLDLSRNGLSFKGCCSQSDFGTTSLKYLDLSFNGVITMSSNFLGLEQLEHLDFQHSNLKQMSEFSVFLSLRNLIYLDISHTHTRVAFNGIFNGLSSLEVLKMAGNSFQENFLPDIFTELRNLTFLDLSQCQLEQLSPTAFNSLSSLQVLNMSHNNFFSLDTFPYKCLNSLQVLDYSLNHIMTSKKQELQHFPSSLAFLNLTQNDFACTCEHQSFLQWIKDQRQLLVEVERMECATPSDKQGMPVLSLNITCQMNK

SEQ ID NO: 3059 - protein, 639 aa, synthetic construct
  REGION 1..639: note = TLR5 (O60602) SP+PP+ECD
MGDHLDLLLGVVLMAGPVFGIPSCSFDGRIAFYRFCNLTQVPQVLNTTERLLLSFNYIRTVTASSFPFLEQLQLLELGSQYTPLTIDKEAFRNLPNLRILDLGSSKIYFLHPDAFQGLFHLFELRLYFCGLSDAVLKDGYFRNLKALTRLDLSKNQIRSLYLHPSFGKLNSLKSIDFSSNQIFLVCEHELEPLQGKTLSFFSLAANSLYSRVSVDWGKCMNPFRNMVLEILDVSGNGWTVDITGNFSNAISKSQAFSLILAHHIMGAGFGFHNIKDPDQNTFAGLARSSVRHLDLSHGFVFSLNSRVFETLKDLKVLNLAYNKINKIADEAFYGLDNLQVLNLSYNLLGELYSSNFYGLPKVAYIDLQKNHIAIIQDQTFKFLEKLQTLDLRDNALTTIHFIPSIPDIFLSGNKLVTLPKINLTANLIHLSENRLENLDILYFLLRVPHLQILILNQNRFSSCSGDQTPSENPSLEQLFLGENMLQLAWETELCWDVFEGLSHLQVLYLNHNYLNSLPPGVFSHLTALRGLSLNSNRLTVLSHNDLPANLEILDISRNQLLAPNPDVFVSLSVLDITHNKFICECELSTFINWLNHTNVTIAGPPADIYCVYPDSFSGVSLFSLSTEGCDEEEVLKSLK

SEQ ID NO: 3060 - protein, 586 aa, synthetic construct
  REGION 1..586: note = TLR6 (Q9Y2C9) SP+PP+ECD
MTKDKEPIVKSFHFVCLMIIIVGTRIQFSDGNEFAVDKSKRGLIHVPKDLPLKTKVLDMSQNYIAELQVSDMSFLSELTVLRLSHNRIQLLDLSVFKFNQDLEYLDLSHNQLQKISCHPIVSFRHLDLSFNDFKALPICKEFGNLSQLNFLGLSAMKLQKLDLLPIAHLHLSYILLDLRNYYIKENETESLQILNAKTLHLVFHPTSLFAIQVNISVNTLGCLQLTNIKLNDDNCQVFIKFLSELTRGSTLLNFTLNHIETTWKCLVRVFQFLWPKPVEYLNIYNLTIIESIREEDFTYSKTTLKALTIEHITNQVFLFSQTALYTVFSEMNIMMLTISDTPFIHMLCPHAPSTFKFLNFTQNVFTDSIFEKCSTLVKLETLILQKNGLKDLFKVGLMTKDMPSLEILDVSWNSLESGRHKENCTWVESIVVLNLSSNMLTDSVFRCLPPRIKVLDLHSNKIKSVPKQVVKLEALQELNVAFNSLTDLPGCGSFSSLSVLIIDHNSVSHPSADFFQSCQKMRSIKAGDNPFQCTCELREFVKNIDQVSSEVLEGWPDSYKCDYPESYRGSPLKDFHMSELSCNITL

SEQ ID NO: 3061 - protein, 839 aa, synthetic construct
  REGION 1..839: note = TLR7 (Q9NYK1) SP+PP+ECD
MVFPMWTLKRQILILFNIILISKLLGARWFPKTLPCDVTLDVPKNHVIVDCTDKHLTEIPGGIPTNTTNLTLTINHIPDISPASFHRLDHLVEIDFRCNCVPIPLGSKNNMCIKRLQIKPRSFSGLTYLKSLYLDGNQLLEIPQGLPPSLQLLSLEANNIFSIRKENLTELANIEILYLGQNCYYRNPCYVSYSIEKDAFLNLTKLKVLSLKDNNVTAVPTVLPSTLTELYLYNNMIAKIQEDDFNNLNQLQILDLSGNCPRCYNAPFPCAPCKNNSPLQIPVNAFDALTELKVLRLHSNSLQHVPPRWFKNINKLQELDLSQNFLAKEIGDAKFLHFLPSLIQLDLSFNFELQVYRASMNLSQAFSSLKSLKILRIRGYVFKELKSFNLSPLHNLQNLEVLDLGTNFIKIANLSMFKQFKRLKVIDLSVNKISPSGDSSEVGFCSNARTSVESYEPQVLEQLHYFRYDKYARSCRFKNKEASFMSVNESCYKYGQTLDLSKNSIFFVKSSDFQHLSFLKCLNLSGNLISQTLNGSEFQPLAELRYLDFSNNRLDLLHSTAFEELHKLEVLDISSNSHYFQSEGITHMLNFTKNLKVLQKLMMNDNDISSSTSRTMESESLRTLEFRGNHLDVLWREGDNRYLQLFKNLLKLEELDISKNSLSFLPSGVFDGMPPNLKNLSLAKNGLKSFSWKKLQCLKNLETLDLSHNQLTTVPERLSNCSRSLKNLILKNNQIRSLTKYFLQDAFQLRYLDLSSNKIQMIQKTSFPENVLNNLKMLLLHHNRFLCTCDAVWFVWWVNHTEVTIPYLATDVTCVGPGAHKGQSVISLDLYTCELDLTN

SEQ ID NO: 3062 - protein, 827 aa, synthetic construct
  REGION 1..827: note = TLR8 (Q9NR97) SP+PP+ECD
MENMFLQSSMLTCIFLLISGSCELCAEENFSRSYPCDEKKQNDSVIAECSNRRLQEVPQTVGKYVTELDLSDNFITHITNESFQGLQNLTKINLNHNPNVQHQNGNPGIQSNGLNITDGAFLNLKNLRELLLEDNQLPQIPSGLPESLTELSLIQNNIYNITKEGISRLINLKNLYLAWNCYFNKVCEKTNIEDGVFETLTNLELLSLSFNSLSHVPPKLPSSLRKLFLSNTQIKYISEEDFKGLINLTLLDLSGNCPRCFNAPFPCVPCDGGASINIDRFAFQNLTQLRYLNLSSTSLRKINAAWFKNMPHLKVLDLEFNYLVGEIASGAFLTMLPRLEILDLSFNYIKGSYPQHINISRNFSKLLSLRALHLRGYVFQELREDDFQPLMQLPNLSTINLGINFIKQIDFKLFQNFSNLEIIYLSENRISPLVKDTRQSYANSSSFQRHIRKRRSTDFEFDPHSNFYHFTRPLIKPQCAAYGKALDLSLNSIFFIGPNQFENLPDIACLNLSANSNAQVLSGTEFSAIPHVKYLDLTNNRLDFDNASALTELSDLEVLDLSYNSHYFRIAGVTHHLEFIQNFTNLKVLNLSHNNIYTLTDKYNLESKSLVELVFSGNRLDILWNDDDNRYISIFKGLKNLTRLDLSLNRLKHIPNEAFLNLPASLTELHINDNMLKFFNWTLLQQFPRLELLDLRGNKLLFLTDSLSDFTSSLRTLLLSHNRISHLPSGFLSEVSSLKHLDLSSNLLKTINKSALETKTTTKLSMLELHGNPFECTCDIGDFRRWMDEHLNVKIPRLVDVICASPGDQRGKSIVSLELTTCVSDVT

SEQ ID NO: 3063 - protein, 818 aa, synthetic construct
  REGION 1..818: note = TLR9 (Q9NR96) SP+PP+ECD
MGFCRSALHPLSLLVQAIMLAMTLALGTLPAFLPCELQPHGLVNCNWLFLKSVPHFSMAAPRGNVTSLSLSSNRIHHLHDSDFAHLPSLRHLNLKWNCPPVGLSPMHFPCHMTIEPSTFLAVPTLEELNLSYNNIMTVPALPKSLISLSLSHTNILMLDSASLAGLHALRFLFMDGNCYYKNPCRQALEVAPGALLGLGNLTHLSLKYNNLTVVPRNLPSSLEYLLLSYNRIVKLAPEDLANLTALRVLDVGGNCRRCDHAPNPCMECPRHFPQLHPDTFSHLSRLEGLVLKDSSLSWLNASWFRGLGNLRVLDLSENFLYKCITKTKAFQGLTQLRKLNLSFNYQKRVSFAHLSLAPSFGSLVALKELDMHGIFFRSLDETTLRPLARLPMLQTLRLQMNFINQAQLGIFRAFPGLRYVDLSDNRISGASELTATMGEADGGEKVWLQPGDLAPAPVDTPSSEDFRPNCSTLNFTLDLSRNNLVTVQPEMFAQLSHLQCLRLSHNCISQAVNGSQFLPLTGLQVLDLSHNKLDLYHEHSFTELPRLEALDLSYNSQPFGMQGVGHNFSFVAHLRTLRHLSLAHNNIHSQVSQQLCSTSLRALDFSGNALGHMWAEGDLYLHFFQGLSGLIWLDLSQNRLHTLLPQTLRNLPKSLQVLRLRDNYLAFFKWWSLHFLPKLEVLDLAGNQLKALTNGSLPAGTRLRRLDVSCNSISFVAPGFFSKAKELRELNLSANALKTVDHSWFGPLASALQILDVSANPLHCACGAAFMDFLLEVQAAVPGLPSRVKCGSPGQLQGLSIFAQDLRLCLDEALSWDC

SEQ ID NO: 3064 - protein, 187 aa, synthetic construct
  REGION 1..187: note = TMED7 (Q9Y3B3) SP+PP+ECD
MPRPGSAQRWAAVAGRWGCRLLALLLLVPGPGGASEITFELPDNAKQCFYEDIAQGTKCTLEFQVITGGHYDVDCRLEDPDGKVLYKEMKKQYDSFTFTASKNGTYKFCFSNEFSTFTHKTVYFDFQVGEDPPLFPSENRVSALTQMESACVSIHEALKSVIDYQTHFRLREAQGRSRAEDLNTRVA

SEQ ID NO: 3065 - protein, 330 aa, synthetic construct
  REGION 1..330: note = TMEFF1 (Q8IYR6) SP+PP+ECD
MGAAAAEAPLRLPAAPPLAFCCYTSVLLLFAFSLPGSRASNQPPGGGGGSGGDCPGGKGKSINCSELNVRESDVRVCDESSCKYGGVCKEDGDGLKCACQFQCHTNYIPVCGSNGDTYQNECFLRRAACKHQKEITVIARGPCYSDNGSGSGEGEEEGSGAEVHRKHSKCGPCKYKAECDEDAENVGCVCNIDCSGYSFNPVCASDGSSYNNPCFVREASCIKQEQIDIRHLGHCTDTDDTSLLGKKDDGLQYRPDVKDASDQREDVYIGNHMPCPENLNGYCIHGKCEFIYSTQKASCRCESGYTGQHCEKTDFSILYVVPSRQKLTHV

SEQ ID NO: 3066 - protein, 320 aa, synthetic construct
  REGION 1..320: note = TMEFF2 (Q9UIK5) SP+PP+ECD
MVLWESPRQCSSWTLCEGFCWLLLLPVMLLIVARPVKLAAFPTSLSDCQTPTGWNCSGYDDRENDLFLCDTNTCKFDGECLRIGDTVTCVCQFKCNNDYVPVCGSNGESYQNECYLRQAACKQQSEILVVSEGSCATDAGSGSGDGVHEGSGETSQKETSTCDICQFGAECDEDAEDVWCVCNIDCSQTNFNPLCASDGKSYDNACQIKEASCQKQEKIEVMSLGRCQDNTTTTTKSEDGHYARTDYAENANKLEESAREHHIPCPEHYNGFCMHGKCEHSINMQEPSCRCDAGYTGQHCEKKDYSVLYVVPGPVRFQYV

SEQ ID NO: 3067 - protein, 468 aa, synthetic construct
  REGION 1..468: note = TMEM108 (Q6UXF1) SP+PP+ECD
MKRSLQALYCQLLSFLLILALTEALAFAIQEPSPRESLQVLPSGTPPGTMVTAPHSSTRHTSVVMLTPNPDGPPSQAAAPMATPTPRAEGHPPTHTISTIAATVTAPHSESSLSTGPAPAAMATTSSKPEGRPRGQAAPTILLTKPPGATSRPTTAPPRTTTRRPPRPPGSSRKGAGNSSRPVPPAPGGHSRSKEGQRGRNPSSTPLGQKRPLGKIFQIYKGNFTGSVEPEPSTLTPRTPLWGYSSSPQPQTVAATTVPSNTSWAPTTTSLGPAKDKPGLRRAAQGGGSTFTSQGGTPDATAASGAPVSPQAAPVPSQRPHHGDPQDGPSHSDSWLTVTPGTSRPLSTSSGVFTAATGPTPAAFDTSVSAPSQGIPQGASTTPQAPTHPSRVSESTISGAKEETVATLTMTDRVPSPLSTVVSTATGNFLNRLVPAGTWKPGTAGNISHVAEGDKPQHRATICLSKMD

SEQ ID NO: 3068 - protein, 166 aa, synthetic construct
  REGION 1..166: note = TMEM123 (Q8N131) SP+PP+ECD
MGLGARGAWAALLLGTLQVLALLGAAHESAAMAASANIENSGLPHNSSANSTETLQHVPSDHTNETSNSTVKPPTSVASDSSNTTVTTMKPTAASNTTTPGMVSTNMTSTTLKSTPKTTSVSQNTSQISTSTMTVTHNSSVTSAASSVTITTTMHSEAKKGSKFDT

SEQ ID NO: 3069 - protein, 852 aa, synthetic construct
  REGION 1..852: note = TMEM132A (Q24JP5) SP+PP+ECD
MCARMAGRTTAAPRGPYGPWLCLLVALALDVVRVDCGQAPLDPVYLPAALELLDAPEHFRVQQVGHYPPANSSLSSRSETFLLLQPWPRAQPLLRASYPPFATQQVVPPRVTEPHQRPVPWDVRAVSVEAAVTPAEPYARVLFHLKGQDWPPGSGSLPCARLHATHPAGTAHQACRFQPSLGACVVELELPSHWFSQASTTRAELAYTLEPAAEGPGGCGSGEENDPGEQALPVGGVELRPADPPQYQEVPLDEAVTLRVPDMPVRPGQLFSATLLLRHNFTASLLTLRIKVKKGLHVTAARPAQPTLWTAKLDRFKGSRHHTTLITCHRAGLTEPDSSPLELSEFLWVDFVVENSTGGGVAVTRPVTWQLEYPGQAPEAEKDKMVWEILVSERDIRALIPLAKAEELVNTAPLTGVPQHVPVRLVTVDGGGALVEVTEHVGCESANTQVLQVSEACDAVFVAGKESRGARGVRVDFWWRRLRASLRLTVWAPLLPLRIELTDTTLEQVRGWRVPGPAEGPAEPAAEASDEAERRARGCHLQYQRAGVRFLAPFAAHPLDGGRRLTHLLGPDWLLDVSHLVAPHARVLDSRVASLEGGRVVVGREPGVTSIEVRSPLSDSILGEQALAVTDDKVSVLELRVQPVMGISLTLSRGTAHPGEVTATCWAQSALPAPKQEVALSLWLSFSDHTVAPAELYDRRDLGLSVSAEEPGAILPAEEQGAQLGVVVSGAGAEGLPLHVALHPPEPCRRGRHRVPLASGTAWLGLPPASTPAPALPSSPAWSPPATEATMGGKRQVAGSVGGNTGVRGKFERAEEEARKEETEAREEEEEEEEEMVPAPQHVTELELGMYA

SEQ ID NO: 3070 - protein, 922 aa, synthetic construct
  REGION 1..922: note = TMEM132C (Q8N3T6) SP+PP+ECD
MRSEGAAPGPAAPLCGALSLLLGALLGKVIEGHGVTDNIQRFSSLPPYLPVSYHILRAETSFFLKEANQDLLRNSSLQARVESFFTYKTRQPPVLNASYGPFSVEKVVPLDLMLTSNFLGPTNKFSFDWKLKAHILRDKVYLSRPKVQVLFHIMGRDWDDHGAGEKLPCLRVFAFRETREVRGSCRLKGDLGLCVAELELLSSWFSAPTVGAGRKKSMDQPEGTPVELYYTVHPGNERGDCAGGDFRKGNAIRPGKDGLEETTSHLQRIGTVGLYRAQDSAQLSELRLDGNVVIWLPSRPVKQGEVVTAYVTISSNSSVDLFILRAKVKKGVNILSAQTREPRQWGVKQEVGSGGKHVTATVACQRLGPSPRNRSSSLFNEVVQMNFEIASFSSLSGTQPITWQVEYPRKGTTDIAVSEIFVSQKDLVGIVPLAMDTEILNTAVLTGKTVAMPIKVVSVEENSAVMDISESVECKSTDEDVIKVSERCDYIFVNGKEIKGKMDAVVNFTYQYLSAPLCVTVWVPRLPLQIEVSDTELSQIKGWRVPIVTNKRPTRESEDEDEEERRGRGCALQYQHATVRVLTQFVSEGAGPWGQPNYLLSPNWQFDITHLVADFMKLEEPHVATLQDSRVLVGREVGMTTIQVLSPLSDSILAEKTITVLDDKVSVTDLAIQLVAGLSVALYPNAENSKAVTAVVTAEEVLRTPKQEAVFSTWLQFSDGSVTPLDIYDTKDFSLAATSQDEAVVSVPQPRSPRWPVVVAEGEGQGPLIRVDMTIAEACQKSKRKSILAVGVGNVRVKFGQNDADSSPGGDYEEDEIKNHASDRRQKGQHHERTGQDGHLYGSSPVEREEGALRRATTTARSLLDNKVVKNSRADGGRLAGEGQLQNIPIDFTNFPAHVDLPKAGSGLEENDLVQTPRGLSD

SEQ ID NO: 3071 - protein, 915 aa, synthetic construct
  REGION 1..915: note = TMEM132D (Q14C87) SP+PP+ECD
MCPSEMGTLWHHWSPVLISLAALFSKVTEGRGILESIQRFSLLPTYLPVTYHINNADVSFFLKEANQDIMRNSSLQSRVESFLIYKSRRLPVLNASYGPFSIEQVVPQDLMLPSNPFGFTNKFSLNWKLKAHILRDKVYLSRPKVQVLFHIMGRDWDDRSAGEKLPCLRVFAFRETREVRGSCRLQGDLGLCVAELELLSSWFSPPTVVAGRRKSVDQPEGTPVELYYTVHPGGERGDCVREDARRSNGIRTGHSDIDESGPPLQRIGSIFLYQTHRKPSLRELRLDNSVAIHYIPKTVRKGDVLTFPVSISRNSTEDRFTLRAKVKKGVNIIGVRASSPSIWDVKERTDYTGKYAPAVIVCQKKAAGSENSADGASYEVMQIDVEVEEPGDLPATQLVTWQVEYPGEITSDLGVSKIYVSPKDLIGVVPLAMEAEILNTAILTGKTVAVPVKVVSVEDDGTVTELLESVECRSSDEDVIKVSDRCDYVFVNGKEMKGKVNVVVNFTYQHLSSPLEMTVWVPRLPLQIEVSDTELNQIKGWRVPIVSSRRPAGDSEEEEDDERRGRGCTLQYQHAMVRVLTQFVAEAAGPGGHLAHLLGSDWQVDITELINDFMQVEEPRIAKLQGGQILMGQELGMTTIQILSPLSDTILAEKTITVLDEKVTITDLGVQLVTGLSLSLQLSPGSNRAIFATAVAQELLQRPKQEAAISCWVQFSDGSVTPLDIYDGKDFSLMATSLDEKVVSIHQDPKFKWPIIAAETEGQGTLVKVEMVISESCQKSKRKSVLAVGTANIKVKFGQNDANPNTSDSRHTGAGVHMENNVSDRRPKKPSQEWGSQEGQYYGSSSMGLMEGRGTTTDRSILQKKKGQESLLDDNSHLQTIPSDLTSFPAQVDLPRSNGEMDGNDLMQASKGLSD

SEQ ID NO: 3072 - protein, 893 aa, synthetic construct
  REGION 1..893: note = TMEM132E (Q6IEE7) SP+PP+ECD
MAPGMSGRGGAALLCLSALLAHASGRSHPASPSPPGPQASPVLPVSYRLSHTRLAFFLREARPPSPAVANSSLQRSEPFVVFQTKELPVLNVSLGPFSTSQVVARELLQPSSTLDIPERLTVNWKVRAFIVRSHVPASQPVVQVLFYVAGRDWDDFGVTERLPCVRLHAFRDAREVKSSCRLSGGLATCLVRAELPLAWFGPPAPAAPPTARRKSPDGLEPEATGESQQAELYYTLHAPDASGGCGGSRRGAGPGVGARAESPTQHPLLRIGSISLFRPPPRRTLQEHRLDSNLMIRLPDRPLKPGEVLSILLYLAPNSSSPSSPSVEHFTLRVKAKKGVTLLGTKSRSGQWHVTSELLTGAKHSTATVDVAWAQSTPLPPREGQGPLEILQLDFEMENFTSQSVKRRIMWHIDYRGHGALPDLERAVTELTVIQRDVQAILPLAMDTEIINTAILTGRTVAIPVKVIAIEVNGLVLDISALVECESDNEDIIKVSSSCDYVFVSGKESRGSMNARVTFRYDVLNAPLEMTVWVPKLPLHIELSDARLSQVKGWRVPILPDRRSVRESEDEDEEEEERRQSASRGCTLQYQHATLQVFTQFHTTSSEGTDQVVTMLGPDWLVEVTDLVSDFMRVGDPRVAHMVDSSTLAGLEPGTTPFKVVSPLTEAVLGETLLTVTEEKVSITQLQAQVVASLALSLRPSPGSSHTILATTAAQQTLSFLKQEALLSLWLSYSDGTTAPLSLYSPRDYGLLVSSLDEHVATVTQDRAFPLVVAEAEGSGELLRAELTIAESCQKTKRKSVLATTPVGLRVHFGRDEEDPTYDYPGPSQPGPGGGEDEARGAGPPGSALPAPEAPGPGTASPVVPPTEDFLPLPTGFLQVPRGLTDLEIGMYA

SEQ ID NO: 3073 - protein, 75 aa, synthetic construct
  REGION 1..75: note = TMEM154 (Q6P9G4) SP+PP+ECD
MQAPRAALVFALVIALVPVGRGNYEELENSGDTTVESERPNKVTIPSTFAAVTIKETLNANINSTNFAPDENQLE

SEQ ID NO: 3074 - protein, 230 aa, synthetic construct
  REGION 1..230: note = TMEM158 (Q8WZ71) SP+PP+ECD
MLPLLAALLAAACPLPPVRGGAADAPGLLGVPSNASVNASSADEPIAPRLLASAAPGPPERPGPEEAAAAAAPCNISVQRQMLSSLLVRWGRPRGFQCDLLLFSTNAHGRAFFAAAFHRVGPPLLIEHLGLAAGGAQQDLRLCVGCGWVRGRRTGRLRPAAAPSAAAATAGAPTALPAYPAAEPPGPLWLQGEPLHFCCLDFSLEELQGEPGWRLNRKPIESTLVACFMT

SEQ ID NO: 3075 - protein, 70 aa, synthetic construct
  REGION 1..70: note = TMEM213 (A2RRL7) SP+PP+ECD
MQRLPAATRATLILSLAFASLHSACSAEASSSNSSSLTAHHPDPGTLEQCLNVDFCPQAARCCRTGVDEY

SEQ ID NO: 3076 - protein, 204 aa, synthetic construct
  REGION 1..204: note = TMEM219 (Q86XT9) SP+PP+ECD
MGNCQAGHNLHLCLAHHPPLVCATLILLLLGLSGLGLGSFLLTHRTGLRSPDIPQDWVSFLRSFGQLTLCPRNGTVTGKWRGSHVVGLLTTLNFGDGPDRNKTRTFQATVLGSQMGLKGSSAGQLVLITARVTTERTAGTCLYFSAVPGILPSSQPPISCSEEGAGNATLSPRMGEECVSVWSHEGLVLTKLLTSEELALCGSR

SEQ ID NO: 3077 - protein, 232 aa, synthetic construct
  REGION 1..232: note = TMEM25 (Q86YD3) SP+PP+ECD
MALPPGPAALRHTLLLLPALLSSGWGELEPQIDGQTWAERALRENERHAFTCRVAGGPGTPRLAWYLDGQLQEASTSRLLSVGGEAFSGGTSTFTVTAHRAQHELNCSLQDPRSGRSANASVILNVQFKPEIAQVGAKYQEAQGPGLLVVLFALVRANPPANVTWIDQDGPVTVNTSDFLVLDAQNYPWLTNHTVQLQLRSLAHNLSVVATNDVGVTSASLPAPGLLATRVE

SEQ ID NO: 3078 - protein, 141 aa, synthetic construct
  REGION 1..141: note = TMEM27 (Q9HBJ8) SP+PP+ECD
MLWLLFFLVTAIHAELCQPGAENAFKVRLSIRTALGDKAYAWDTNEEYLFKAMVAFSMRKVPNREATEISHVLLCNVTQRVSFWFVVTDPSKNHTLPAVEVQSAIRMNKNRINNAFFLNDQTLEFLKIPSTLAPPMDPSVP

SEQ ID NO: 3079 - protein, 89 aa, synthetic construct
  REGION 1..89: note = TMEM9 (Q9P0T7) SP+PP+ECD
MKLLSLVAVVGCLLVPPAEANKSSEDIRCKCICPPYRNISGHIYNQNVSQKDCNCLHVVEPMPVPGHDVEAYCLLCECRYEERSTTTIK

SEQ ID NO: 3080 - protein, 145 aa, synthetic construct
  REGION 1..145: note = TMEM95 (Q3KNT9) SP+PP+ECD
MWRLALGGVFLAAAQACVFCRLPAHDLSGRLARLCSQMEARQKECGASPDFSAFALDEVSMNKVTEKTHRVLRVMEIKEAVSSLPSYWSWLRKTKLPEYTREALCPPACRGSTTLYNCSTCKGTEVSCWPRKRCFPGSQDLWEAK

SEQ ID NO: 3081 - protein, 104 aa, synthetic construct
  REGION 1..104: note = TMEM9B (Q9NQ34) SP+PP+ECD
MATLWGGLLRLGSLLSLSCLALSVLLLAQLSDAAKNFEDVRCKCICPPYKENSGHIYNKNISQKDCDCLHVVEPMPVRGPDVEAYCLRCECKYEERSSVTIKVT

SEQ ID NO: 3082 - protein, 220 aa, synthetic construct
  REGION 1..220: note = TMIGD1 (Q6UXZ0) SP+PP+ECD
MAWKSSVIMQMGRFLLLVILFLPREMTSSVLTVNGKTENYILDTTPGSQASLICAVQNHTREEELLWYREEGRVDLKSGNKINSSSVCVSSISENDNGISFTCRLGRDQSVSVSVVLNVTFPPLLSGNDFQTVEEGSNVKLVCNVKANPQAQMMWYKNSSLLDLEKSRHQIQQTSESFQLSITKVEKPDNGTYSCIAKSSLKTESLDFHLIVKDKTVGVP

SEQ ID NO: 3083 - protein, 150 aa, synthetic construct
  REGION 1..150: note = TMIGD2 (Q96BF3) SP+PP+ECD
MGSPGMVLGLLVQIWALQEASSLSVQQGPNLLQVRQGSQATLVCQVDQATAWERLRVKWTKDGAILCQPYITNGSLSLGVCGPQGRLSWQAPSHLTLQLDPVSLNHSGAYVCWAAVEIPELEEAEGNITRLFVDPDDPTQNRNRIASFPG

SEQ ID NO: 3084 - protein, 375 aa, synthetic construct
  REGION 1..375: note = TMX3 (Q96JJ7) SP+PP+ECD
MAAWKSWTALRLCATVVVLDMVVCKGFVEDLDESFKENRNDDIWLVDFYAPWCGHCKKLEPIWNEVGLEMKSIGSPVKVGKMDATSYSSIASEFGVRGYPTIKLLKGDLAYNYRGPRTKDDIIEFAHRVSGALIRPLPSQQMFEHMQKRHRVFFVYVGGESPLKEKYIDAASELIVYTYFFSASEEVVPEYVTLKEMPAVLVFKDETYFVYDEYEDGDLSSWINRERFQNYLAMDGFLLYELGDTGKLVALAVIDEKNTSVEHTRLKSIIQEVARDYRDLFHRDFQFGHMDGNDYINTLLMDELTVPTVVVLNTSNQQYFLLDRQIKNVEDMVQFINNILDGTVEAQGGDSILQRLKRIVFDAKSTIVSIFKSSP

SEQ ID NO: 3085 - protein, 189 aa, synthetic construct
  REGION 1..189: note = TMX4 (Q9H1E5) SP+PP+ECD
MAGGRCGPQLTALLAAWIAAVAATAGPEEAALPPEQSRVQPMTASNWTLVMEGEWMLKFYAPWCPSCQQTDSEWEAFAKNGEILQISVGKVDVIQEPGLSGRFFVTTLPAFFHAKDGIFRRYRGPGIFEDLQNYILEKKWQSVEPLTGWKSPASLTMSGMAGLFSISGKIWHLHNYFTVTLGIPAWCSY

SEQ ID NO: 3086 - protein, 239 aa, synthetic construct
  REGION 1..239: note = TNFRSF10A (O00220) SP+PP+ECD
MAPPPARVHLGAFLAVTPNPGSAASGTEAAAATPSKVWGSSAGRIEPRGGGRGALPTSMGQHGPSARARAGRAPGPRPAREASPRLRVHKTFKFVVVGVLLQVVPSSAATIKLHDQSIGTQQWEHSPLGELCPPGSHRSEHPGACNRCTEGVGYTNASNNLFACLPCTACKSDEEERSPCTTTRNTACQCKPGTFRNDNSAEMCRKCSRGCPRGMVKVKDCTPWSDIECVHKESGNGHN

SEQ ID NO: 3087 - protein, 211 aa, synthetic construct
  REGION 1..211: note = TNFRSF10D (Q9UBN6) SP+PP+ECD
MGLWGQSVPTASSARAGRYPGARTASGTRPWLLDPKILKFVVFIVAVLLPVRVDSATIPRQDEVPQQTVAPQQQRRSLKEEECPAGSHRSEYTGACNPCTEGVDYTIASNNLPSCLLCTVCKSGQTNKSSCTTTRDTVCQCEKGSFQDKNSPEMCRTCRTGCPRGMVKVSNCTPRSDIKCKNESAASSTGKTPAAEETVTTILGMLASPYH

SEQ ID NO: 3088 - protein, 212 aa, synthetic construct
  REGION 1..212: note = TNFRSF11A (Q9Y6Q6) SP+PP+ECD
MAPRARRRRPLFALLLLCALLARLQVALQIAPPCTSEKHYEHLGRCCNKCEPGKYMSSKCTTTSDSVCLPCGPDEYLDSWNEEDKCLLHKVCDTGKALVAVVAGNSTTPRRCACTAGYHWSQDCECCRRNTECAPGLGAQHPLQLNKDTVCKPCLAGYFSDAFSSTDKCRPWTNCTFLGKRVEHHGTEKSDAVCSSSLPARKPPNEPHVYLP

SEQ ID NO: 3089 - protein, 202 aa, synthetic construct
  REGION 1..202: note = TNFRSF14 (Q92956) SP+PP+ECD
MEPPGDWGPPPWRSTPKTDVLRLVLYLTFLGAPCYAPALPSCKEDEYPVGSECCPKCSPGYRVKEACGELTGTVCEPCPPGTYIAHLNGLSKCLQCQMCDPAMGLRASRNCSRTENAVCGCSPGHFCIVQDGDHCAACRAYATSSPGQRVQKGGTESQDTLCQNCPPGTFSPNGTLEECQHQTKCSWLVTKAGAGTSSSHWV

SEQ ID NO: 3090 - protein, 162 aa, synthetic construct
  REGION 1..162: note = TNFRSF18 (Q9Y5U5) SP+PP+ECD
MAQHGAMGAFRALCGLALLCALSLGQRPTGGPGCGPGRLLLGTGTDARCCRVHTTRCCRDYPGEECCSEWDCMCVQPEFHCGDPCCTTCRHHPCPPGQGVQSQGKFSFGFQCIDCASGTFSGGHEGHCKPWTDCTQFGFLTVFPGNKTHNAVCVPGSPPAEP

SEQ ID NO: 3091 - protein, 170 aa, synthetic construct
  REGION 1..170: note = TNFRSF19 (Q9NS68) SP+PP+ECD
MALKVLLEQEKTFFTLLVLLGYLSCKVTCESGDCRQQEFRDRSGNCVPCNQCGPGMELSKECGFGYGEDAQCVTCRLHRFKEDWGFQKCKPCLDCAVVNRFQKANCSATSDAICGDCLPGFYRKTKLVGFQDMECVPCGDPPPPYEPHCASKVNLVKIASTASSPRDTAL

SEQ ID NO: 3092 - protein, 211 aa, synthetic construct
  REGION 1..211: note = TNFRSF1A (P19438) SP+PP+ECD
MGLSTVPDLLLPLVLLELLVGIYPSGVIGLVPHLGDREKRDSVCPQGKYIHPQNNSICCTKCHKGTYLYNDCPGPGQDTDCRECESGSFTASENHLRHCLSCSKCRKEMGQVEISSCTVDRDTVCGCRKNQYRHYWSENLFQCFNCSLCLNGTVHLSCQEKQNTVCTCHAGFFLRENECVSCSNCKKSLECTKLCLPQIENVKGTEDSGTT

SEQ ID NO: 3093 - protein, 257 aa, synthetic construct
  REGION 1..257: note = TNFRSF1B (P20333) SP+PP+ECD
MAPVAVWAALAVGLELWAAAHALPAQVAFTPYAPEPGSTCRLREYYDQTAQMCCSKCSPGQHAKVFCTKTSDTVCDSCEDSTYTQLWNWVPECLSCGSRCSSDQVETQACTREQNRICTCRPGWYCALSKQEGCRLCAPLRKCRPGFGVARPGTETSDVVCKPCAPGTFSNTTSSTDICRPHQICNVVAIPGNASMDAVCTSTSPTRSMAPGAVHLPQPVSTRSQHTQPTPEPSTAPSTSFLLPMGPSPPAEGSTGD

SEQ ID NO: 3094 - protein, 349 aa, synthetic construct
  REGION 1..349: note = TNFRSF21 (O75509) SP+PP+ECD
MGTSPSSSTALASCSRIARRATATMIAGSLLLLGFLSTTTAQPEQKASNLIGTYRHVDRATGQVLTCDKCPAGTYVSEHCTNTSLRVCSSCPVGTFTRHENGIEKCHDCSQPCPWPMIEKLPCAALTDRECTCPPGMFQSNATCAPHTVCPVGWGVRKKGTETEDVRCKQCARGTFSDVPSSVMKCKAYTDCLSQNLVVIKPGTKETDNVCGTLPSFSSSTSPSPGTAIFPRPEHMETHEVPSSTYVPKGMNSTESNSSASVRPKVLSSIQEGTVPDNTSSARGKEDVNKTLPNLQVVNHQQGPHHRHILKLLPSMEATGGEKSSTPIKGPKRGHPRQNLHKHFDINEH

SEQ ID NO: 3095 - protein, 199 aa, synthetic construct
  REGION 1..199: note = TNFRSF25 (Q93038) SP+PP+ECD
MEQRPRGCAAVAAALLLVLLGARAQGGTRSPRCDCAGDFHKKIGLFCCRGCPAGHYLKAPCTEPCGNSTCLVCPQDTFLAWENHHNSECARCQACDEQASQVALENCSAVADTRCGCKPGWFVECQVSQCVSSSPFYCQPCLDCGALHRHTRLLCSRRDTDCGTCLPGFYEHGDGCVSCPTSTLGSCPERCAAVCGWRQ

SEQ ID NO: 3096 - protein, 214 aa, synthetic construct
  REGION 1..214: note = TNFRSF4 (P43489) SP+PP+ECD
MCVGARRLGRGPCAALLLLGLGLSTVTGLHCVGDTYPSNDRCCHECRPGNGMVSRCSRSQNTVCRPCGPGFYNDVVSSKPCKPCTWCNLRSGSERKQLCTATQDTVCRCRAGTQPLDSYKPGVDCAPCPPGHFSPGDNQACKPWTNCTLAGKHTLQPASNSSDAICEDRDPPATQPQETQGPPARPITVQPTEAWPRTSQGPSTRPVEVPGGRA

SEQ ID NO: 3097 - protein, 385 aa, synthetic construct
  REGION 1..385: note = TNFRSF8 (P28908) SP+PP+ECD
MRVLLAALGLLFLGALRAFPQDRPFEDTCHGNPSHYYDKAVRRCCYRCPMGLFPTQQCPQRPTDCRKQCEPDYYLDEADRCTACVTCSRDDLVEKTPCAWNSSRVCECRPGMFCSTSAVNSCARCFFHSVCPAGMIVKFPGTAQKNTVCEPASPGVSPACASPENCKEPSSGTIPQAKPTPVSPATSSASTMPVRGGTRLAQEAASKLTRAPDSPSSVGRPSSDPGLSPTQPCPEGSGDCRKQCEPDYYLDEAGRCTACVSCSRDDLVEKTPCAWNSSRTCECRPGMICATSATNSCARCVPYPICAAETVTKPQDMAEKDTTFEAPPLGTQPDCNPTPENGEAPASTSPTQSLLVDSQASKTLPIPTSAPVALSSTGKPVLDAG

SEQ ID NO: 3098 - protein, 186 aa, synthetic construct
  REGION 1..186: note = TNFRSF9 (Q07011) SP+PP+ECD
MGNSCYNIVATLLLVLNFERTRSLQDPCSNCPAGTFCDNNRNQICSPCPPNSFSSAGGQRTCDICRQCKGVFRTRKECSSTSNAECDCTPGFHCLGAGCSMCEQDCKQGQELTKKGCKDCCFGTFNDQKRGICRPWTNCSLDGKSVLVNGTKERDVVCGPSPADLSPGASSVTPPAPAREPGHSPQ

SEQ ID NO: 3099 - protein, 309 aa, synthetic construct
  REGION 1..309: note = TP53I13 (Q8NBR0) SP+PP+ECD
MAPPPPSPQLLLLAALARLLGPSEVMAGPAEEAGAHCPESLWPLPPQVSPRVTYTRVSPGQAEDVTFLYHPCAHPWLKLQLALLAYACMANPSLTPDFSLTQDRPLVLTAWGLALEMAWVEPAWAAHWLMRRRRRKQRKKKAWIYCESLSGPAPSEPTPGRGRLCRRGCVQALALAFALRSWRPPGTEVTSQGPRQPSSSGAKRRRLRAALGPQPTRSALRFPSASPGSLKAKQSMAGIPGRESNAPSVPTVSLLPGAPGGNASSRTEAQVPNGQGSPGGCVCSSQASPAPRAAAPPRAARGPTPRTEE

SEQ ID NO: 3100 - protein, 355 aa, synthetic construct
  REGION 1..355: note = TPBG (Q13641) SP+PP+ECD
MPGGCSRGPAAGDGRLRLARLALVLLGWVSSSSPTSSASSFSSSAPFLASAVSAQPPLPDQCPALCECSEAARTVKCVNRNLTEVPTDLPAYVRNLFLTGNQLAVLPAGAFARRPPLAELAALNLSGSRLDEVRAGAFEHLPSLRQLDLSHNPLADLSPFAFSGSNASVSAPSPLVELILNHIVPPEDERQNRSFEGMVVAALLAGRALQGLRRLELASNHFLYLPRDVLAQLPSLRHLDLSNNSLVSLTYVSFRNLTHLESLHLEDNALKVLHNGTLAELQGLPHIRVFLDNNPWVCDCHMADMVTWLKETEVVQGKDRLTCAYPEKMRNRVLLELNSADLDCDPILPPSLQTS

SEQ ID NO: 3101 - protein, 307 aa, synthetic construct
  REGION 1..307: note = TPBGL (P0DKB5) SP+PP+ECD
MAPRAGQPGLQGLLLVAAALSQPAAPCPFQCYCFGGPKLLLRCASGAELRQPPRDVPPDARNLTIVGANLTVLRAAAFAGGDGDGDQAAGVRLPLLSALRLTHNHIEVVEDGAFDGLPSLAALDLSHNPLRALGGGAFRGLPALRSLQLNHALVRGGPALLAALDAALAPLAELRLLGLAGNALSRLPPAALRLARLEQLDVRLNALAGLDPDELRALERDGGLPGPRLLLADNPLRCGCAARPLLAWLRNATERVPDSRRLRCAAPRALLDRPLLDLDGARLRCADSGADARGEEAEAAGPELEAS

SEQ ID NO: 3102 - protein, 846 aa, synthetic construct
  REGION 1..846: note = TPO (P07202) SP+PP+ECD
MRALAVLSVTLVMACTEAFFPFISRGKELLWGKPEESRVSSVLEESKRLVDTAMYATMQRNLKKRGILSPAQLLSFSKLPEPTSGVIARAAEIMETSIQAMKRKVNLKTQQSQHPTDALSEDLLSIIANMSGCLPYMLPPKCPNTCLANKYRPITGACNNRDHPRWGASNTALARWLPPVYEDGFSQPRGWNPGFLYNGFPLPPVREVTRHVIQVSNEVVTDDDRYSDLLMAWGQYIDHDIAFTPQSTSKAAFGGGADCQMTCENQNPCFPIQLPEEARPAAGTACLPFYRSSAACGTGDQGALFGNLSTANPRQQMNGLTSFLDASTVYGSSPALERQLRNWTSAEGLLRVHARLRDSGRAYLPFVPPRAPAACAPEPGIPGETRGPCFLAGDGRASEVPSLTALHTLWLREHNRLAAALKALNAHWSADAVYQEARKVVGALHQIITLRDYIPRILGPEAFQQYVGPYEGYDSTANPTVSNVFSTAAFRFGHATIHPLVRRLDASFQEHPDLPGLWLHQAFFSPWTLLRGGGLDPLIRGLLARPAKLQVQDQLMNEELTERLFVLSNSSTLDLASINLQRGRDHGLPGYNEWREFCGLPRLETPADLSTAIASRSVADKILDLYKHPDNIDVWLGGLAENFLPRARTGPLFACLIGKQMKALRDGDWFWWENSHVFTDAQRRELEKHSLSRVICDNTGLTRVPMDAFQVGKFPEDFESCDSITGMNLEAWRETFPQDDKCGFPESVENGDFVHCEESGRRVLVYSCRHGYELQGREQLTCTQEGWDFQPPLCKDVNECADGAHPPCHASARCRNTKGGFQCLCADPYELGDDGRTCVDSGRLPR

SEQ ID NO: 3103 - protein, 283 aa, synthetic construct
  REGION 1..283: note = TPSG1 (Q9NRR2) SP+PP+ECD
MALGACGLLLLLAVPGVSLRTLQPGCGRPQVSDAGGRIVGGHAAPAGAWPWQASLRLRRMHVCGGSLLSPQWVLTAAHCFSGSLNSSDYQVHLGELEITLSPHFSTVRQIILHSSPSGQPGTSGDIALVELSVPVTLSSRILPVCLPEASDDFCPGIRCWVTGWGYTREGEPLPPPYSLREVKVSVVDTETCRRDYPGPGGSILQPDMLCARGPGDACQDDSGGPLVCQVNGAWVQAGTVSWGEGCGRPNRPGVYTRVPAYVNWIRRHITASGGSESGYPRLP

SEQ ID NO: 3104 - protein, 477 aa, synthetic construct
  REGION 1..477: note = TRABD2A (Q86V40) SP+PP+ECD
MSPWSWFLLQTLCLLPTGAASRRGAPGTANCELKPQQSELNSFLWTIKRDPPSYFFGTIHVPYTRVWDFIPDNSKEAFLQSSIVYFELDLTDPYTISALTSCQMLPQGENLQDVLPRDIYCRLKRHLEYVKLMMPLWMTPDQRGKGLYADYLFNAIAGNWERKRPVWVMLMVNSLTEVDIKSRGVPVLDLFLAQEAERLRKQTGAVEKVEEQCHPLNGLNFSQVIFALNQTLLQQESLRAGSLQIPYTTEDLIKHYNCGDLSSVILSHDSSQVPNFINATLPPQERITAQEIDSYLRRELIYKRNERIGKRVKALLEEFPDKGFFFAFGAGHFMGNNTVLDVLRREGYEVEHAPAGRPIHKGKSKKTSTRPTLSTIFAPKVPTLEVPAPEAVSSGHSTLPPLVSRPGSADTPSEAEQRFRKKRRRSQRRPRLRQFSDLWVRLEESDIVPQLQVPVLDRHISTELRLPRRGHSHHSQM

SEQ ID NO: 3105 - protein, 494 aa, synthetic construct
  REGION 1..494: note = TRABD2B (A6NFA1) SP+PP+ECD
MHAALAGPLLAALLATARARPQPPDGGQCRPPGSQRDLNSFLWTIRRDPPAYLFGTIHVPYTRVWDFIPDNSKAAFQASTRVYFELDLTDPYTISALASCQLLPHGENLQDVLPHELYWRLKRHLDYVKLMMPSWMTPAQRGKGLYADYLFNAIAGNWERKRPVWVMLMVNSLTERDVRFRGVPVLDLYLAQQAEKMKKTTGAVEQVEEQCHPLNNGLNFSQVLFALNQTLLQQESVRAGSLQASYTTEDLIKHYNCGDLSAVIFNHDTSQLPNFINTTLPPHEQVTAQEIDSYFRQELIYKRNERMGKRVMALLRENEDKICFFAFGAGHFLGNNTVIDILRQAGLEVDHTPAGQAIHSPAPQSPAPSPEGTSTSPAPVTPAAAVPEAPSVTPTAPPEDEDPALSPHLLLPDSLSQLEEFGRQRKWHKRQSTHQRPRQFNDLWVRIEDSTTASPPPLPLQPTHSSGTAKPPFQLSDQLQQQDPPGPASSSAPT

SEQ ID NO: 3106 - protein, 205 aa, synthetic construct
  REGION 1..205: note = TREM1 (Q9NP99) SP+PP+ECD
MRKTRLWGLLWMLFVSELRAATKLTEEKYELKEGQTLDVKCDYTLEKFASSQKAWQIIRDGEMPKTLACTERPSKNSHPVQVGRIILEDYHDHGLLRVRMVNLQVEDSGLYQCVIYQPPKEPHMLFDRIRLVVTKGFSGTPGSNENSTQNVYKIPPTTTKALCPLYTSPRTVTQAPPKSTADVSTPDSEINLTNVTDIIRVPVFN

SEQ ID NO: 3107 - protein, 174 aa, synthetic construct
  REGION 1..174: note = TREM2 (Q9NZC2) SP+PP+ECD
MEPLRLLILLFVTELSGAHNTTVFQGVAGQSLQVSCPYDSMKHWGRRKAWCRQLGEKGPCQRVVSTHNLWLLSFLRRWNGSTAITDDTLGGTLTITLRNLQPHDAGLYQCQSLHGSEADTLRKVLVEVLADPLDHRDAGDLWFPGESESFEDAHVEHSISRSLLEGEIPFPPTS

SEQ ID NO: 3108 - protein, 268 aa, synthetic construct
  REGION 1..268: note = TREML2 (Q5T2D2) SP+PP+ECD
MAPAFLLLLLLWPQGCVSGPSADSVYTKVRLLEGETLSVQCSYKGYKNRVEGKVWCKIRKKKCEPGFARVWVKGPRYLLQDDAQAKVVNITMVALKLQDSGRYWCMRNTSGILYPLMGFQLDVSPAPQTERNIPFTHLDNILKSGTVTTGQAPTSGPDAPFTTGVMVFTPGLITLPRLLASTRPASKTGYSFTATSTTSQGPRRTMGSQTVTASPSNARDSSAGPESISTKSGDLSTRSPTTGLCLTSRSLLNRLPSMPSIRHQDVYS

SEQ ID NO: 3109 - protein, 696 aa, synthetic construct
  REGION 1..696: note = TRIL (Q7L0X0) SP+PP+ECD
MEAARALRLLLVVCGCLALPPLAEPVCPERCDCQHPQHLLCTNRGLRVVPKTSSLPSPHDVLTYSLGGNFITNITAFDFHRLGQLRRLDLQYNQIRSLHPKTFEKLSRLEELYLGNNLLQALAPGTLAPLRKLRILYANGNEISRLSRGSFEGLESLVKLRLDGNALGALPDAVFAPLGNLLYLHLESNRIRFLGKNAFAQLGKLRFLNLSANELQPSLRHAATFAPLRSLSSLILSANNLQHLGPRIFQHLPRLGLLSLRGNQLTHLAPEAFWGLEALRELRLEGNRLSQLPTALLEPLHSLEALDLSGNELSALHPATFGHLGRLRELSLRNNALSALSGDIFAASPALYRLDLDGNGWTCDCRLRGLKRWMGDWHSQGRLLTVFVQCRHPPALRGKYLDYLDDQQLQNGSCADPSPSASLTADRRRQPLPTAAGEEMTPPAGLAEELPPQPQLQQQGRFLAGVAWDGAARELVGNRSALRLSRRGPGLQQPSPSVAAAAGPAPQSLDLHKKPQRGRPTRADPALAEPTPTASPGSAPSPAGDPWQRATKHRLGTEHQERAAQSDGGAGLPPLVSDPCDFNKFILCNLTVEAVGADSASVRWAVREHRSPRPLGGARFRLLFDRFGQQPKFHRFVYLPESSDSATLRELRGDTPYLVCVEGVLGGRVCPVAPRDHCAGLVTLPEAGSRGGVDYQ

SEQ ID NO: 3110 - protein, 321 aa, synthetic construct
  REGION 1..321: note = TXNDC15 (Q96J42) SP+PP+ECD
MVPAAGRRPPRVMRLLGWWQVLLWVLGLPVRGVEVAEESGRLWSEEQPAHPLQVGAVYLGEEELLHDPMGQDRAAEEANAVLGLDTQGDHMVMLSVIPGEAEDKVSSEPSGVTCGAGGAEDSRCNVRESLFSLDGAGAHFPDREEEYYTEPEVAESDAAPTEDSNNTESLKSPKVNCEERNITGLENFTLKILNMSQDLMDFLNPNGSDCTLVLFYTPWCRFSASLAPHFNSLPRAFPALHFLALDASQHSSLSTRFGTVAVPNILLFQGAKPMARFNHTDRTLETLKIFIFNQTGIEAKKNVVVTQADQIGPLPSTLIKS

SEQ ID NO: 3111 - protein, 476 aa, synthetic construct
  REGION 1..476: note = TYR (P14679) SP+PP+ECD
MLLAVLYCLLWSFQTSAGHFPRACVSSKNLMEKECCPPWSGDRSPCGQLSGRGSCQNILLSNAPLGPQFPFTGVDDRESWPSVFYNRTCQCSGNFMGFNCGNCKFGFWGPNCTERRLLVRRNIFDLSAPEKDKFFAYLTLAKHTISSDYVIPIGTYGQMKNGSTPMFNDINIYDLFVWMHYYVSMDALLGGSEIWRDIDFAHEAPAFLPWHRLFLLRWEQEIQKLTGDENFTIPYWDWRDAEKCDICTDEYMGGQHPTNPNLLSPASFFSSWQIVCSRLEEYNSHQSLCNGTPEGPLRRNPGNHDKSRTPRLPSSADVEFCLSLTQYESGSMDKAANFSFRNTLEGFASPLTGIADASQSSMHNALHIYMNGTMSQVQGSANDPIFLLHHAFVDSIFEQWLRRHRPLQEVYPEANAPIGHNRESYMVPFIPLYRNGDFFISSKDLGYDYSYLQDSDPDSFQDYIKSYLEQASRIWS

SEQ ID NO: 3112 - protein, 429 aa, synthetic construct
  REGION 1..429: note = TYRO3 (Q06418) SP+PP+ECD
MALRRSMGRPGLPPLPLPPPPRLGLLLAALASLLLPESAAAGLKLMGAPVKLTVSQGQPVKLNCSVEGMEEPDIQWVKDGAVVQNLDQLYIPVSEQHWIGFLSLKSVERSDAGRYWCQVEDGGETEISQPVWLTVEGVPFFTVEPKDLAVPPNAPFQLSCEAVGPPEPVTIVWWRGTTKIGGPAPSPSVLNVTGVTQSTMFSCEAHNLKGLASSRTATVHLQALPAAPFNITVTKLSSSNASVAWMPGADGRALLQSCTVQVTQAPGGWEVLAVVVPVPPFTCLLRDLVPATNYSLRVRCANALGPSPYADWVPFQTKGLAPASAPQNLHAIRTDSGLILEWEEVIPEAPLEGPLGPYKLSWVQDNGTQDELTVEGTRANLTGWDPQKDLIVRVCVSNAVGCGPWSQPLVVSSHDRAGQQGPPHSRTSW

SEQ ID NO: 3113 - protein, 477 aa, synthetic construct
  REGION 1..477: note = TYRP1 (P17643) SP+PP+ECD
MSAPKLLSLGCIFFPLLLFQQARAQFPRQCATVEALRSGMCCPDLSPVSGPGTDRCGSSSGRGRCEAVTADSRPHSPQYPHDGRDDREVWPLRFFNRTCHCNGNFSGHNCGTCRPGWRGAACDQRVLIVRRNLLDLSKEEKNHFVRALDMAKRTTHPLFVIATRRSEEILGPDGNTPQFENISIYNYFVWTHYYSVKKTFLGVGQESFGEVDFSHEGPAFLTWHRYHLLRLEKDMQEMLQEPSFSLPYWNFATGKNVCDICTDDLMGSRSNFDSTLISPNSVFSQWRVVCDSLEDYDTLGTLCNSTEDGPIRRNPAGNVARPMVQRLPEPQDVAQCLEVGLFDTPPFYSNSTNSFRNTVEGYSDPTGKYDPAVRSLHNLAHLFLNGTGGQTHLSPNDPIFVLLHTFTDAVFDEWLRRYNADISTFPLENAPIGHNRQYNMVPFWPPVTNTEMFVTAPDNLGYTYEIQWPSREFSVPE

SEQ ID NO: 3114 - protein, 471 aa, synthetic construct
  REGION 1..471: note = UGT8 (Q16880) SP+PP+ECD
MKSYTPYFILLWSAVGIAKAAKIIIVPPIMFESHMYIFKTLASALHERGHHTVFLLSEGRDIAPSNHYSLQRYPGIFNSTTSDAFLQSKMRNIFSGRLTAIELFDILDHYTKNCDLMVGNHALIQGLKKEKFDLLLVDPNDMCGFVIAHLLGVKYAVFSTGLWYPAEVGAPAPLAYVPEFNSLLTDRMNLLQRMKNTGVYLISRLGVSFLVLPKYERIMQKYNLLPEKSMYDLVHGSSLWMLCTDVALEFPRPTLPNVVYVGGILTKPASPLPEDLQRWVNGANEHGFVLVSFGAGVKYLSEDIANKLAGALGRLPQKVIWRFSGPKPKNLGNNTKLIEWLPQNDLLGHSKIKAFLSHGGLNSIFETIYHGVPVVGIPLFGDHYDTMTRVQAKGMGILLEWKTVTEKELYEALVKVINNPSYRQRAQKLSEIHKDQPGHPVNRTIYWIDYIIRHNGAHHLRAAVHQISFCQ

SEQ ID NO: 3115 - protein, 1272 aa, synthetic construct
  REGION 1..1272: note = UMODL1 (Q5DID0) SP+PP+ECD
MLRTSGLALLALVSAVGPSQASGFTEKGLSLLGYQLCSHRVTHTVQKVEAVQTSYTSYVSCGGWIPWRRCPKMVYRTQYLVVEVPESRNVTDCCEGYEQLGLYCVLPLNQSGQFTSRPGACPAEGPEPSTSPCSLDIDCPGLEKCCPWSGGRYCMAPAPQAPERDPVGSWYNVTILVKMDFKELQQVDPRLLNHMRLLHSLVTSALQPMASTVHHLHSAPGNASTTVSRLLLGLPRPLPVADVSTLLGDIAKRVYEVISVQVQDVNECFYEELNACSGRELCANLEGSYWCVCHQEAPATSPRKLNLEWEDCPPVSDYVVLNVTSDSFQVSWRLNSTQNHTFHVRVYRGMELLRSARTQSQALAVAGLEAGVLYRVKTSYQGCGADVSTTLTIKTNAQVFEVTIKIVNHNLTEKLLNRSSVEYQDFSRQLLHEVESSFPPVVSDLYRSGKLRMQIVSLQAGSVVVRLKLTVQDPGFPMGISTLAPILQPLLASTVFQIDRQGTRVQDWDECVDSAEHDCSPAAWCINLEGSYTCQCRTTRDATPSRAGRACEGDLVSPMGGGLSAATGVTVPGLGTGTAALGLENFTLSPSPGYPQGTPAAGQAWTPEPSPRRGGSNVVGYDRNNTGKGVEQELQGNSIMEPPSWPSPTEDPTGHFLWHATRSTRETLLNPTWLRNEDSGPSGSVDLPLTSTLTALKTPACVPVSIGRIMVSNVTSTGFHLAWEADLAMDSTFQLTLTSMWSPAVVLETWNTSVTLSGLEPGVLHLVEIMAKACGKEGARAHLKVRTAARKLIGKVRIKNVRYSESFRNASSQEYRDFLELFFRMVRGSLPATMCQHMDAGGVRMEVVSVTNGSIVVEFHLLIIADVDVQEVSAAFLTAFQTVPLLEVIRGDTFIQDYDECERKEDDCVPGTSCRNTLGSFTCSCEGGAPDFPVEYSERPCEGDSPGNETWATSPERPLTTAGTKAAFVQGTSPTPQGLPQRLNLTGAVRVLCEIEKVVVAIQKRFLQQESIPESSLYLSHPSCNVSHSNGTHVLLEAGWSECGTLMQSNMTNTVVRTTLRNDLSQEGIIHHLKILSPIYCAFQNDLLTSSGFTLEWGVYTIIEDLHGAGNFVTEMQLFIGDSPIPQNYSVSASDDVRIEVGLYRQKSNLKVVLTECWATPSSNARDPITFSFINNSCPVPNTYTNVIENGNSNKAQFKLRIFSFINDSIVYLHCKLRVCMESPGATCKINCNNFRLLQNSETSATHQMSWGPLIRSEGEPPHAEAGLGAGY

SEQ ID NO: 3116 - protein, 306 aa, synthetic construct
  REGION 1..306: note = UNC5A (Q6ZN44) SP+PP+ECD
MAVRPGLWPALLGIVLAAWLRGSGAQQSATVANPVPGANPDLLPHFLVEPEDVYIVKNKPVLLVCKAVPATQIFFKCNGEWVRQVDHVIERSTDGSSGLPTMEVRINVSRQQVEKVFGLEEYWCQCVAWSSSGTTKSQKAYIRIAYLRKNFEQEPLAKEVSLEQGIVLPCRPPEGIPPAEVEWLRNEDLVDPSLDPNVYITREHSLVVRQARLADTANYTCVAKNIVARRRSASAAVIVYVDGSWSPWSKWSACGLDCTHWRSRECSDPAPRNGGEECQGTDLDTRNCTSDLCVHTASGPEDVALY

SEQ ID NO: 3117 - protein, 377 aa, synthetic construct
  REGION 1..377: note = UNC5B (Q8IZJ1) SP+PP+ECD
MGARSGARGALLLALLLCWDPRLSQAGTDSGSEVLPDSFPSAPAEPLPYFLQEPQDAYIVKNKPVELRCRAFPATQIYFKCNGEWVSQNDHVTQEGLDEATGLRVREVQIEVSRQQVEELFGLEDYWCQCVAWSSAGTTKSRRAYVRIAYLRKNFDQEPLGKEVPLDHEVLLQCRPPEGVPVAEVEWLKNEDVIDPTQDTNFLLTIDHNLIIRQARLSDTANYTCVAKNIVAKRRSTTATVIVYVNGGWSSWAEWSPCSNRCGRGWQKRTRTCTNPAPLNGGAFCEGQAFQKTACTTICPVDGAWTEWSKWSACSTECAHWRSRECMAPPPQNGGRDCSGTLLDSKNCTDGLCMQNKKTLSDPNSHLLEASGDAALY

SEQ ID NO: 3118 - protein, 380 aa, synthetic construct
  REGION 1..380: note = UNC5C (O95185) SP+PP+ECD
MRKGLRATAARCGLGLGYLLQMLVLPALALLSASGTGSAAQDDDFFHELPETFPSDPPEPLPHFLIEPEEAYIVKNKPVNLYCKASPATQIYFKCNSEWVHQKDHIVDERVDETSGLIVREVSIEISRQQVEELFGPEDYWCQCVAWSSAGTTKSRKAYVRIAYLRKTFEQEPLGKEVSLEQEVLLQCRPPEGIPVAEVEWLKNEDIIDPVEDRNFYITIDHNLIIKQARLSDTANYTCVAKNIVAKRKSTTATVIVYVNGGWSTWTEWSVCNSRCGRGYQKRTRTCTNPAPLNGGAFCEGQSVQKIACTTLCPVDGRWTPWSKWSTCGTECTHWRRRECTAPAPKNGGKDCDGLVLQSKNCTDGLCMQTAPDSDDVALY

SEQ ID NO: 3119 - protein, 379 aa, synthetic construct
  REGION 1..379: note = UNC5D (Q6UXZ4) SP+PP+ECD
MGRAAATAGGGGGARRWLPWLGLCFWAAGTAAARGTDNGEALPESIPSAPGTLPHFIEEPDDAYIIKSNPIALRCKARPAMQIFFKCNGEWVHQNEHVSEETLDESSGLKVREVFINVTRQQVEDFHGPEDYWCQCVAWSHLGTSKSRKASVRIAYLRKNFEQDPQGREVPIEGMIVLHCRPPEGVPAAEVEWLKNEEPIDSEQDENIDTRADHNLIIRQARLSDSGNYTCMAANIVAKRRSLSATVVVYVNGGWSSWTEWSACNVRCGRGWQKRSRTCTNPAPLNGGAFCEGMSVQKITCTSLCPVDGSWEVWSEWSVCSPECEHLRIRECTAPPPRNGGKFCEGLSQESENCTDGLCILDKKPLHEIKPQSIENASD

SEQ ID NO: 3120 - protein, 155 aa, synthetic construct
  REGION 1..155: note = UPK2 (O00526) SP+PP+ECD
MAPLLPIRTLPLILILLALLSPGAADFNISSLSGLLSPALTESLLVALPPCHLTGGNATLMVRRANDSKVVTSSFVVPPCRGRRELVSVVDSGAGFTVTRLSAYQVTNLVPGTKFYISYLVKKGTATESSREIPMSTLPRRNMESIGLGMARTGG

SEQ ID NO: 3121 - protein, 207 aa, synthetic construct
  REGION 1..207: note = UPK3A (O75631) SP+PP+ECD
MPPLWALLALGCLRFGSAVNLQPQLASVTFATNNPTLTTVALEKPLCMFDSKEALTGTHEVYLYVLVDSAISRNASVQDSTNTPLGSTFLQTEGGRTGPYKAVAFDLIPCSDLPSLDAIGDVSKASQILNAYLVRVGANGTCLWDPNFQGLCNAPLSAATEYRFKYVLVNMSTGLVEDQTLWSDPIRTNQLTPYSTIDTWPGRRSGG

SEQ ID NO: 3122 - protein, 240 aa, synthetic construct
  REGION 1..240: note = UPK3B (Q9BT76) SP+PP+ECD
MGLPWGQPHLGLQMLLLALNCLRPSLSLGEWGSWMDASSQTQGAGGPAGVIGPWAPAPLRLGEAAPGTPTPVSVAHLLSPVATELVPYTPQITAWDLEGKVTATTFSLEQPRCVFDGLASASDTVWLVVAFSNASRGFQNPETLADIPASPQLLTDGHYMTLPLSPDQLPCGDPMAGSGGAPVLRVGHDHGCHQQPFCNAPLPGPGPYREDPRIHRHLARAAKWQHDRHYLHPLFSGRPP

SEQ ID NO: 3123 - protein, 204 aa, synthetic construct
  REGION 1..204: note = UPK3BL (B0FP48) SP+PP+ECD
MDNSWRLGPAIGLSAGQSQLLVSLLLLLTRVQPGTDVAAPEHISYVPQLSNDTLAGRLTLSTFTLEQPLGQFSSHNISDLDTIWLVVALSNATQSFTAPRTNQDIPAPANFSQRGYYLTLRANRVLYQTRGQLHVLRVGNDTHCQPTKIGCNHPLPGPGPYRVKFLVMNDEGPVAETKWSSDTRLQQAQALRAVPGPQSPGTVV

SEQ ID NO: 3124 - protein, 5042 aa, synthetic construct
  REGION 1..5042: note = USH2A (O75445) SP+PP+ECD
MNCPVLSLGSGFLFQVIEMLIFAYFASISLTESRGLFPRLENVGAFKKVSIVPTQAVCGLPDRSTFCHSSAAAESIQFCTQRFCIQDCPYRSSHPTYTALFSAGLSSCITPDKNDLHPNAHSNSASFIFGNHKSCFSSPPSPKLMASFTLAVWLKPEQQGVMCVIEKTVDGQIVFKLTISEKETMFYYRTVNGLQPPIKVMTLGRILVKKWIHLSVQVHQTKISFFINGVEKDHTPFNARTLSGSITDFASGTVQIGQSLNGLEQFVGRMQDFRLYQVALTNREILEVFSGDLLRLHAQSHCRCPGSHPRVHPLAQRYCIPNDAGDTADNRVSRLNPEAHPLSFVNDNDVGTSWVSNVFTNITQLNQGVTISVDLENGQYQVFYIIIQFFSPQPTEIRIQRKKENSLDWEDWQYFARNCGAFGMKNNGDLEKPDSVNCLQLSNFTPYSRGNVTFSILTPGPNYRPGYNNFYNTPSLQEFVKATQIRFHFHGQYYTTETAVNLRHRYYAVDEITISGRCQCHGHADNCDTTSQPYRCLCSQESFTEGLHCDRCLPLYNDKPFRQGDQVYAFNCKPCQCNSHSKSCHYNISVDPFPFEHFRGGGGVCDDCEHNTTGRNCELCKDYFFRQVGADPSAIDVCKPCDCDTVGTRNGSILCDQIGGQCNCKRHVSGRQCNQCQNGFYNLQELDPDGCSPCNCNTSGTVDGDITCHQNSGQCKCKANVIGLRCDHCNFGFKFLRSFNDVGCEPCQCNLHGSVNKFCNPHSGQCECKKEAKGLQCDTCRENFYGLDVTNCKACDCDTAGSLPGTVCNAKTGQCICKPNVEGRQCNKCLEGNFYLRQNNSFLCLPCNCDKTGTINGSLLCNKSTGQCPCKLGVTGLRCNQCEPHRYNLTIDNFQHCQMCECDSLGTLPGTICDPISGQCLCVPNRQGRRCNQCQPGFYISPGNATGCLPCSCHTTGAVNHICNSLTGQCVCQDASIAGQRCDQCKDHYFGFDPQTGRCQPCNCHLSGALNETCHLVTGQCFCKQFVTGSKCDACVPSASHLDVNNLLGCSKTPFQQPPPRGQVQSSSAINLSWSPPDSPNAHWLTYSLLRDGFEIYTTEDQYPYSIQYFLDTDLLPYTKYSYYIETTNVHGSTRSVAVTYKTKPGVPEGNLTLSYIIPIGSDSVTLTWTTLSNQSGPIEKYILSCAPLAGGQPCVSYEGHETSATIWNLVPFAKYDFSVQACTSGGCLHSLPITVTTAQAPPQRLSPPKMQKISSTELHVEWSPPAELNGIIIRYELYMRRLRSTKETTSEESRVFQSSGWLSPHSFVESANENALKPPQTMTTITGLEPYTKYEFRVLAVNMAGSVSSAWVSERTGESAPVFMIPPSVFPLSSYSLNISWEKPADNVTRGKVVGYDINMLSEQSPQQSIPMAFSQLLHTAKSQELSYTVEGLKPYRIYEFTITLCNSVGCVTSASGAGQTLAAAPAQLRPPLVKGINSTTIHLRWFPPEELNGPSPIYQLERRESSLPALMTTMMKGIRFIGNGYCKFPSSTHPVNTDFTGIKASFRTKVPEGLIVFAASPGNQEEYFALQLKKGRLYFLFDPQGSPVEVTTTNDHGKQYSDGKWHEIIAIRHQAFGQITLDGIYTGSSAILNGSTVIGDNTGVFLGGLPRSYTILRKDPEIIQKGFVGCLKDVHFMKNYNPSAIWEPLDWQSSEEQINVYNSWEGCPASLNEGAQFLGAGFLELHPYMFHGGMNFEISFKFRTDQLNGLLLFVYNKDGPDFLAMELKSGILTFRLNTSLAFTQVDLLLGLSYCNGKWNKVIIKKEGSFISASVNGLMKHASESGDQPLVVNSPVYVGGIPQELLNSYQHLCLEQGFGGCMKDVKFTRGAVVNLASVSSGAVRVNLDGCLSTDSAVNCRGNDSILVYQGKEQSVYEGGLQPFTEYLYRVIASHEGGSVYSDWSRGRTTGAAPQSVPTPSRVRSLNGYSIEVTWDEPVVRGVIEKYILKAYSEDSTRPPRMPSASAEFVNTSNLTGILTGLLPFKNYAVTLTACTLAGCTESSHALNISTPQEAPQEVQPPVAKSLPSSLLLSWNPPKKANGIITQYCLYMDGRLIYSGSEENYIVTDLAVFTPHQFLLSACTHVGCTNSSWVLLYTAQLPPEHVDSPVLTVLDSRTIHIQWKQPRKISGILERYVLYMSNHTHDFTIWSVIYNSTELFQDHMLQYVLPGNKYLIKLGACTGGGCTVSEASEALTDEDIPEGVPAPKAHSYSPDSFNVSWTEPEYPNGVITSYGLYLDGILIHNSSELSYRAYGFAPWSLHSFRVQACTAKGCALGPLVENRTLEAPPEGTVNVFVKTQGSRKAHVRWEAPFRPNGLLTHSVLFTGIFYVDPVGNNYTLLNVTKVMYSGEETNLWVLIDGLVPFTNYTVQVNISNSQGSLITDPITIAMPPGAPDGVLPPRLSSATPTSLQVVWSTPARNNAPGSPRYQLQMRSGDSTHGFLELFSNPSASLSYEVSDLQPYTEYMFRLVASNGFGSAHSSWIPFMTAEDKPGPVVPPILLDVKSRMMLVTWQHPRKSNGVITHYNIYLHGRLYLRTPGNVTNCTVMHLHPYTAYKFQVEACTSKGCSLSPESQTVWTLPGAPEGIPSPELFSDTPTSVIISWQPPTHPNGLVENFTIERRVKGKEEVTTLVTLPRSHSMRFIDKTSALSPWTKYEYRVLMSTLHGGTNSSAWVEVTTRPSRPAGVQPPVVTVLEPDAVQVTWKPPLIQNGDILSYEIHMPDPHITLTNVTSAVLSQKVTHLIPFTNYSVTIVACSGGNGYLGGCTESLPTYVTTHPTVPQNVGPLSVIPLSESYVVISWQPPSKPNGPNLRYELLRRKIQQPLASNPPEDLNRWHNIYSGTQWLYEDKGLSRFTTYEYMLFVHNSVGFTPSREVTVTTLAGLPERGANLTASVLNHTAIDVRWAKPTVQDLQGEVEYYTLFWSSATSNDSLKILPDVNSHVIGHLKPNTEYWIFISVFNGVHSINSAGLHATTCDGEPQGMLPPEVVIINSTAVRVIWTSPSNPNGVVTEYSIYVNNKLYKTGMNVPGSFILRDLSPFTIYDIQVEVCTIYACVKSNGTQITTVEDTPSDIPTPTIRGITSRSLQIDWVSPRKPNGIILGYDLLWKTWYPCAKTQKLVQDQSDELCKAVRCQKPESICGHICYSSEAKVCCNGVLYNPKPGHRCCEEKYIPFVLNSTGVCCGGRIQEAQPNHQCCSGYYARILPGEVCCPDEQHNRVSVGIGDSCCGRMPYSTSGNQICCAGRLHDGHGQKCCGRQIVSNDLECCGGEEGVVYNRLPGMFCCGQDYVNMSDTICCSASSGESKAHIKKNDPVPVKCCETELIPKSQKCCNGVGYNPLKYVCSDKISTGMMMKETKECRILCPASMEATEHCGRCDFNFTSHICTVIRGSHNSTGKASIEEMCSSAEETIHTGSVNTYSYTDVNLKPYMTYEYRISAWNSYGRGLSKAVRARTKEDVPQGVSPPTWTKIDNLEDTIVLNWRKPIQSNGPIIYYILLRNGIERFRGTSLSFSDKEGIQPFQEYSYQLKACTVAGCATSSKVVAATTQGVPESILPPSITALSAVALHLSWSVPEKSNGVIKEYQIRQVGKGLIHTDTTDRRQHTVTGLQPYTNYSFTLTACTSAGCTSSEPFLGQTLQAAPEGVWVTPRHIIINSTTVELYWSLPEKPNGLVSQYQLSRNGNLLFLGGSEEQNFTDKNLEPNSRYTYKLEVKTGGGSSASDDYIVQTPMSTPEEIYPPYNITVIGPYSIFVAWIPPGILIPEIPVEYNVLLNDGSVTPLAFSVGHHQSTLLENLTPFTQYEIRIQACQNGSCGVSSRMFVKTPEAAPMDLNSPVLKALGSACIEIKWMPPEKPNGIIINYFIYRRPAGIEEESVLFVWSEGALEFMDEGDTLRPFTLYEYRVRACNSKGSVESLWSLTQTLEAPPQDFPAPWAQATSAHSVLLNWTKPESPNGIISHYRVVYQERPDDPTFNSPTVHAFTVKGTSHQAHLYGLEPFTTYRIGVVAANHAGEILSPWTLIQTLESSPSGLRNFIVEQKENGRALLLQWSEPMRTNGVIKTYNIFSDGFLEYSGLNRQFLFRRLDPFTLYTLTLEACTRAGCAHSAPQPLWTDEAPPDSQLAPTVHSVKSTSVELSWSEPVNPNGKIIRYEVIRRCFEGKAWGNQTIQADEKIVFTEYNTERNTFMYNDTGLQPWTQCEYKIYTWNSAGHTCSSWNVVRTLQAPPEGLSPPVISYVSMNPQKLLISWIPPEQSNGIIQSYRLQRNEMLYPFSFDPVTFNYTDEELLPFSTYSYALQACTSGGCSTSKPTSITTLEAAPSEVSPPDLWAVSATQMNVCWSPPTVQNGKITKYLVRYDNKESLAGQGLCLLVSHLQPYSQYNFSLVACTNGGCTASVSKSAWTMEALPENMDSPTLQVTGSESIEITWKPPRNPNGQIRSYELRRDGTIVYTGLETRYRDFTLTPGVEYSYTVTASNSQGGILSPLVKDRTSPSAPSGMEPPKLQARGPQEILVNWDPPVRTNGDIINYTLFIRELFERETKIIHINTTHNSFGMQSYIVNQLKPFHRYEIRIQACTTLGCASSDWTFIQTPEIAPLMQPPPHLEVQMAPGGFQPTVSLLWTGPLQPNGKVLYYELYRRQIATQPRKSNPVLIYNGSSTSFIDSELLPFTEYEYQVWAVNSAGKAPSSWTWCRTGPAPPEGLRAPTFHVISSTQAVVNISAPGKPNGIVSLYRLFSSSAHGAETVLSEGMATQQTLHGLQAFTNYSIGVEACTCFNCCSKGPTAELRTHPAPPSGLSSPQIGTLASRTASFRWSPPMFPNGVIHSYELQFHVACPPDSALPCTPSQIETKYTGLGQKASLGGLQPYTTYKLRVVAHNEVGSTASEWISFTTQKELPQYRAPFSVDSNLSVVCVNWSDTFLLNGQLKEYVLTDGGRRVYSGLDTTLYIPRTADKTFFFQVICTTDEGSVKTPLIQYDTSTGLGLVLTTPGKKKGSRSKSTEFYSELW

SEQ ID NO: 3125 - protein, 575 aa, synthetic construct
  REGION 1..575: note = VASN (Q6EMK4) SP+PP+ECD
MCSRVPLLLPLLLLLALGPGVQGCPSGCQCSQPQTVFCTARQGTTVPRDVPPDTVGLYVFENGITMLDAGSFAGLPGLQLLDLSQNQIASLPSGVFQPLANLSNLDLTANRLHEITNETFRGLRRLERLYLGKNRIRHIQPGAFDTLDRLLELKLQDNELRALPPLRLPRLLLLDLSHNSLLALEPGILDTANVEALRLAGLGLQQLDEGLFSRLRNLHDLDVSDNQLERVPPVIRGLRGLTRLRLAGNTRIAQLRPEDLAGLAALQELDVSNLSLQALPGDLSGLFPRLRLLAAARNPFNCVCPLSWFGPWVRESHVTLASPEETRCHFPPKNAGRLLLELDYADFGCPATTTTATVPTTRPVVREPTALSSSLAPTWLSPTEPATEAPSPPSTAPPTVGPVPQPQDCPPSTCLNGGTCHLGTRHHLACLCPEGFTGLYCESQMGQGTRPSPTPVTPRPPRSLTLGIEPVSPTSLRVGLQRYLQGSSVQLRSLRLTYRNLSGPDKRLVTLRLPASLAEYTVTQLRPNATYSVCVMPLGPGRVPEGEEACGEAHTPPAVHSNHAPVTQAREGNLP

SEQ ID NO: 3126 - protein, 698 aa, synthetic construct
  REGION 1..698: note = VCAM1 (P19320) SP+PP+ECD
MPGKMVVILGASNILWIMFAASQAFKIETTPESRYLAQIGDSVSLTCSTTGCESPFFSWRTQIDSPLNGKVTNEGTTSTLTMNPVSFGNEHSYLCTATCESRKLEKGIQVEIYSFPKDPEIHLSGPLEAGKPITVKCSVADVYPFDRLEIDLLKGDHLMKSQEFLEDADRKSLETKSLEVTFTPVIEDIGKVLVCRAKLHIDEMDSVPTVRQAVKELQVYISPKNTVISVNPSTKLQEGGSVTMTCSSEGLPAPEIFWSKKLDNGNLQHLSGNATLTLIAMRMEDSGIYVCEGVNLIGKNRKEVELIVQEKPFTVEISPGPRIAAQIGDSVMLTCSVMGCESPSFSWRTQIDSPLSGKVRSEGTNSTLTLSPVSFENEHSYLCTVTCGHKKLEKGIQVELYSFPRDPEIEMSGGLVNGSSVTVSCKVPSVYPLDRLEIELLKGETILENIEFLEDTDMKSLENKSLEMTFIPTIEDTGKALVCQAKLHIDDMEFEPKQRQSTQTLYVNVAPRDTTVLVSPSSILEEGSSVNMTCLSQGFPAPKILWSRQLPNGELQPLSENATLTLISTKMEDSGVYLCEGINQAGRSRKEVELIIQVTPKDIKLTAFPSESVKEGDTVIISCTCGNVPETWIILKKKAETGDTVLKSIDGAYTIRKAQLKDAGVYECESKNKVGSQLRSLTLDVQGRENNKDYFSPE

SEQ ID NO: 3127 - protein, 797 aa, synthetic construct
  REGION 1..797: note = VLDLR (P98155) SP+PP+ECD
MGTSALWALWLLLALCWAPRESGATGTGRKAKCEPSQFQCTNGRCITLLWKCDGDEDCVDGSDEKNCVKKTCAESDFVCNNGQCVPSRWKCDGDPDCEDGSDESPEQCHMRTCRIHEISCGAHSTQCIPVSWRCDGENDCDSGEDEENCGNITCSPDEFTCSSGRCISRNFVCNGQDDCSDGSDELDCAPPTCGAHEFQCSTSSCIPISWVCDDDADCSDQSDESLEQCGRQPVIHTKCPASEIQCGSGECIHKKWRCDGDPDCKDGSDEVNCPSRTCRPDQFECEDGSCIHGSRQCNGIRDCVDGSDEVNCKNVNQCLGPGKFKCRSGECIDISKVCNQEQDCRDWSDEPLKECHINECLVNNGGCSHICKDLVIGYECDCAAGFELIDRKTCGDIDECQNPGICSQICINLKGGYKCECSRGYQMDLATGVCKAVGKEPSLIFTNRRDIRKIGLERKEYIQLVEQLRNTVALDADIAAQKLFWADLSQKAIFSASIDDKVGRHVKMIDNVYNPAAIAVDWVYKTIYWTDAASKTISVATLDGTKRKFLFNSDLREPASIAVDPLSGFVYWSDWGEPAKIEKAGMNGFDRRPLVTADIQWPNGITLDLIKSRLYWLDSKLHMLSSVDLNGQDRRIVLKSLEFLAHPLALTIFEDRVYWIDGENEAVYGANKFTGSELATLVNNLNDAQDIIVYHELVQPSGKNWCEEDMENGGCEYLCLPAPQINDHSPKYTCSCPSGYNVEENGRDCQSTATTVTYSETKDTNTTEISATSGLVPGGINVTTAVSEVSVPPKGTS

SEQ ID NO: 3128 - protein, 232 aa, synthetic construct
  REGION 1..232: note = VSIG1 (Q86XK7) SP+PP+ECD
MVFAFWKVFLILSCLAGQVSVVQVTIPDGFVNVTVGSNVTLICIYTTTVASREQLSIQWSFFHKKEMEPISIYFSQGGQAVAIGQFKDRITGSNDPGNASITISHMQPADSGIYICDVNNPPDFLGQNQGILNVSVLVKPSKPLCSVQGRPETGHTISLSCLSALGTPSPVYYWHKLEGRDIVPVKENFNPTTGILVIGNLTNFEQGYYQCTAINRLGNSSCEIDLTSSHPE

SEQ ID NO: 3129 - protein, 413 aa, synthetic construct
  REGION 1..413: note = VSIG10 (Q8N0Z9) SP+PP+ECD
MAAGGSAPEPRVLVCLGALLAGWVAVGLEAVVIGEVHENVTLHCGNISGLRGQVTWYRNNSEPVFLLSSNSSLRPAEPRFSLVDATSLHIESLSLGDEGIYTCQEILNVTQWFQVWLQVASGPYQIEVHIVATGTLPNGTLYAARGSQVDFSCNSSSRPPPVVEWWFQALNSSSESFGHNLTVNFFSLLLISPNLQGNYTCLALNQLSKRHRKVTTELLVYYPPPSAPQCWAQMASGSFMLQLTCRWDGGYPDPDFLWIEEPGGVIVGKSKLGVEMLSESQLSDGKKFKCVTSHIVGPESGASCMVQIRGPSLLSEPMKTCFTGGNVTLTCQVSGAYPPAKILWLRNLTQPEVIIQPSSRHLITQDGQNSTLTIHNCSQDLDEGYYICRADSPVGVREMEIWLSVKEPLNIGG

SEQ ID NO: 3130 - protein, 776 aa, synthetic construct
  REGION 1..776: note = VSIG10L (Q86VR7) SP+PP+ECD
MDNPQALPLFLLLASLVGILTLRASSGLQQTNFSSAFSSDSKSSSQGLGVEVPSIKPPSWKVPDQFLDSKASAGISDSSWFPEALSSNMSGSFWSNVSAEGQDLSPVSPFSETPGSEVFPDISDPQVPAKDPKPSFTVKTPASNISTQVSHTKLSVEAPDSKFSPDDMDLKLSAQSPESKFSAETHSAASFPQQVGGPLAVLVGTTIRLPLVPIPNPGPPTSLVVWRRGSKVLAAGGLGPGAPLISLDPAHRDHLRFDQARGVLELASAQLDDAGVYTAEVIRAGVSQQTHEFTVGVYEPLPQLSVQPKAPETEEGAAELRLRCLGWGPGRGELSWSRDGRALEAAESEGAETPRMRSEGDQLLIVRPVRSDHARYTCRVRSPFGHREAAADVSVFYGPDPPTITVSSDRDAAPARFVTAGSNVTLRCAAASRPPADITWSLADPAEAAVPAGSRLLLPAVGPGHAGTYACLAANPRTGRRRRSLLNLTVADLPPGAPQCSVEGGPGDRSLRFRCSWPGGAPAASLQFQGLPEGIRAGPVSSVLLAAVPAHPRLSGVPITCLARHLVATRTCTVTPEAPREVLLHPLVAETRLGEAEVALEASGCPPPSRASWAREGRPLAPGGGSRLRLSQDGRKLHIGNFSLDWDLGNYSVLCSGALGAGGDQITLIGPSISSWRLQRARDAAVLTWDVERGALISSFEIQAWPDGPALGRTSTYRDWVSLLILGPQERSAVVPLPPRNPGTWTFRILPILGGQPGTPSQSRVYRAGPTLSHGA

SEQ ID NO: 3131 - protein, 243 aa, synthetic construct
  REGION 1..243: note = VSIG2 (Q96IQ7) SP+PP+ECD
MAELPGPFLCGALLGFLCLSGLAVEVKVPTEPLSTPLGKTAELTCTYSTSVGDSFALEWSFVQPGKPISESHPILYFTNGHLYPTGSKSKRVSLLQNPPTVGVATLKLTDVHPSDTGTYLCQVNNPPDFYTNGLGLINLTVLVPPSNPLCSQSGQTSVGGSTALRCSSSEGAPKPVYNWVRLGTFPTPSPGSMVQDEVSGQLILTNLSLTSSGTYRCVATNQMGSASCELTLSVTEPSQGRVA

SEQ ID NO: 3132 - protein, 135 aa, synthetic construct
  REGION 1..135: note = VSTM1 (Q6UX27) SP+PP+ECD
MTAEFLSLLCLGLCLGYEDEKKNEKPPKPSLHAWPSSVVEAESNVTLKCQAHSQNVTFVLRKVNDSGYKQEQSSAENEAEFPFTDLKPKDAGRYFCAYKTTASHEWSESSEHLQLVVTDKHDELEAPSMKTDTRT

SEQ ID NO: 3133 - protein, 180 aa, synthetic construct
  REGION 1..180: note = VSTM4 (Q8IW00) SP+PP+ECD
MRLLALAAAALLARAPAPEVCAALNVTVSPGPVVDYLEGENATLLCHVSQKRRKDSLLAVRWFFAHSFDSQEALMVKMTKLRVVQYYGNFSRSAKRRRLRLLEEQRGALYRLSVLTLQPSDQGHYVCRVQEISRHRNKWTAWSNGSSATEMRVISLKASEESSFEKTKETWAFFEDLYVY

SEQ ID NO: 3134 - protein, 147 aa, synthetic construct
  REGION 1..147: note = VSTM5 (A8MXK1) SP+PP+ECD
MRPLPSGRRKTRGISLGLFALCLAAARCLQSQGVSLYIPQATINATVKEDILLSVEYSCHGVPTIEWTYSSNWGTQKIVEWKPGTQANISQSHKDRVCTFDNGSIQLFSVGVRDSGYYVITVTERLGSSQFGTIVLHVSEILYEDLH

SEQ ID NO: 3135 - protein, 259 aa, synthetic construct
  REGION 1..259: note = VTCN1 (Q7Z7D3) SP+PP+ECD
MASLGQILFWSIISIIIILAGAIALIIGFGISGRHSITVTTVASAGNIGEDGILSCTFEPDIKLSDIVIQWLKEGVLGLVHEFKEGKDELSEQDEMFRGRTAVFADQVIVGNASLRLKNVQLTDAGTYKCYIITSKGKGNANLEYKTGAFSMPEVNVDYNASSETLRCEAPRWFPQPTVVWASQVDQGANFSEVSNTSFELNSENVTMKVVSVLYNVTINNTYSCMIENDIAKATGDIKVTESEIKRRSHLQLLNSKAS

SEQ ID NO: 3136 - protein, 2757 aa, synthetic construct
  REGION 1..2757: note = ZAN (Q9Y493) SP+PP+ECD
MVPPVWTLLLLVGAALFRKEKPPDQKLVVRSSRDNYVLTQCDFEDDAKPLCDWSQVSADDEDWVRASGPSPTGSTGAPGGYPNGEGSYLHMESNSFHRGGVARLLSPDLWEQGPLCVHFAHHMFGLSWGAQLRLLLLSGEEGRRPDVLWKHWNTQRPSWMLTTVTVPAGFTLPTRLMFEGTRGSTAYLDIALDALSIRRGSCNRVCMMQTCSFDIPNDLCDWTWIPTASGAKWTQKKGSSGKPGVGPDGDFSSPGSGCYMLLDPKNARPGQKAVLLSPVSLSSGCLSFSFHYILRGQSPGAALHIYASVLGSIRKHTLFSGQPGPNWQAVSVNYTAVGRIQFAVVGVFGKTPEPAVAVDATSIAPCGEGFPQCDFEDNAHPFCDWVQTSGDGGHWALGHKNGPVHGMGPAGGFPNAGGHYIYLEADEFSQAGQSVRLVSRPFCAPGDICVEFAYHMYGLGEGTMLELLLGSPAGSPPIPLWKRVGSQRPYWQNTSVTVPSGHQQPMQLIFKGIQGSNTASVVAMGFILINPGTCPVKVLPELPPVSPVSSTGPSETTGLTENPTISTKKPTVSIEKPSVTTEKPTVPKEKPTIPTEKPTISTEKPTIPSEKPNMPSEKPTIPSEKPTILTEKPTIPSEKPTIPSEKPTISTEKPTVPTEEPTTPTEETTTSMEEPVIPTEKPSIPTEKPSIPTEKPTISMEETIISTEKPTISPEKPTIPTEKPTIPTEKSTISPEKPTTPTEKPTIPTEKPTISPEKPTTPTEKPTISPEKLTIPTEKPTIPTEKPTIPTEKPTISTEEPTTPTEETTISTEKPSIPMEKPTLPTEETTTSVEETTISTEKLTIPMEKPTISTEKPTIPTEKPTISPEKLTIPTEKLTIPTEKPTIPIEETTISTEKLTIPTEKPTISPEKPTISTEKPTIPTEKPTIPTEETTISTEKLTIPTEKPTISPEKLTIPTEKPTISTEKPTIPTEKLTIPTEKPTIPTEKPTIPTEKLTALRPPHPSPTATGLAALVMSPHAPSTPMTSVILGTTTTSRSSTERCPPNARYESCACPASCKSPRPSCGPLCREGCVCNPGFLFSDNHCIQASSCNCFYNNDYYEPGAEWFSPNCTEHCRCWPGSRVECQISQCGTHTVCQLKNGQYGCHPYAGTATCLVYGDPHYVTFDGRHFGFMGKCTYILAQPCGNSTDPFFRVTAKNEEQGQEGVSCLSKVYVTLPESTVTLLKGRRTLVGGQQVTLPAIPSKGVFLGASGRFVELQTEFGLRVRWDGDQQLYVTVSSTYSGKLCGLCGNYDGNSDNDHLKLDGSPAGDKEELGNSWQTDQDEDQECQKYQVVNSPSCDSSLQSSMSGPGFCGRLVDTHGPFETCLLHVKAASFFDSCMLDMCGFQGLQHLLCTHMSTMTTTCQDAGHAVKPWREPHFCPMACPPNSKYSLCAKPCPDTCHSGFSGMFCSDRCVEACECNPGFVLSGLECIPRSQCGCLHPAGSYFKVGERWYKPGCKELCVCESNNRIRCQPWRCRAQEFCGQQDGIYGCHAQGAATCTASGDPHYLTFDGALHHFMGTCTYVLTRPCWSRSQDSYFVVSATNENRGGILEVSYIKAVHVTVFDLSISLLRGCKVMLNGHRVALPVWLAQGRVTIRLSSNLVLLYTNFGLQVRYDGSHLVEVTVPSSYGGQLCGLCGNYNNNSLDDNLRPDRKLAGDSMQLGAAWKLPESSEPGCFLVGGKPSSCQENSMADAWNKNCAILINPQGPFSQCHQVVPPQSSFASCVHGQCGTKGDTTALCRSLQAYASLCAQAGQAPAWRNRTFCPMRCPPGSSYSPCSSPCPDTCSSINNPRDCPKALPCAESCECQKGHILSGTSCVPLGQCGCTDPAGSYHPVGERWYTENTCTRLCTCSVHNNITCFQSTCKPNQICWALDGLLHCRASGVGVCQLPGESHYVSFDGSNHSIPDACTLVLVKVCHPAMALPFFKISAKHEKEEGGTEAFRLHEVYIDIYDAQVTLQKGHRVLINSKQVTLPAISQIPGVSVKSSSIYSIVNIKIGVQVKFDGNHLLEIEIPTTYYGKVCGMCGNFNDEEEDELMMPSDEVANSDSEFVNSWKDKDIDPSCQSLLVDEQQIPAEQQENPSGNCRAADLRRAREKCEAALRAPVWAQCASRIDLTPFLVDCANTLCEFGGLYQALCQALQAFGATCQSQGLKPPLWRNSSFCPLECPAYSSYTNCLPSCSPSCWDLDGRCEGAKVPSACAEGCICQPGYVLSEDKCVPRSQCGCKDAHGGSIPLGKSWVSSGCTEKCVCTGGAIQCGDFRCPSGSHCQLTSDNSNSNCVSDKSEQCSVYGDPRYLTFDGFSYRLQGRMTYVLIKTVDVLPEGVEPLLVEGRNKMDPPRSSIFLQEVITTVYGYKVQLQAGLELVVNNQKMAVPYRPNEHLRVTLWGQRLYLVTDFELVVSFGGRKNAVISLPSMYEGLVSGLCGNYDKNRKNDMMLPSGALTQNLNTFGNSWEVKTEDALLRFPRAIPAEEEGQGAELGLRTGLQVSECSPEQLASNSTQACRVLADPQGPFAACHQTVAPEPFQEHCVLDLCSAQDPREQEELRCQVLSGHGVSSRYHISELYDTLPSILCQPGRPRGLRGPLRGRLRQHPRLCLQWHPEPPLADCGCTSNGIYYQLGSSFLTEDCSQRCTCASSRILLCEPFSCRAGEVCTLGNHTQGCFPESPCLQNPCQNDGQCREQGATFTCECEVGYGGGLCMEPRDAPPPRKPAS

SEQ ID NO: 3137 - protein, 250 aa, synthetic construct
  REGION 1..250: note = ZNRF4 (Q8WWF5) SP+PP+ECD
MPLCRPEHLMPRASRVPVAASLPLSHAVIPTQLPSRPGHRPPGRPRRCPKASCLPPPVGPSSTQTAKRVTMGWPRPGRALVAVKALLVLSLLQVPAQAVVRAVLEDNSSSVDFADLPALFGVPLAPEGIRGYLMEVKPANACHPIEAPRLGNRSLGAIVLIRRYDCTFDLKVLNAQRAGFEAAIVHNVHSDDLVSMTHVYEDLRGQIAIPSVFVSEAASQDLRVILGCNKSAHALLLPDDPPCHDLGCHP

SEQ ID NO: 3138 - protein, 601 aa, synthetic construct
  REGION 1..601: note = ZP1 (P60852) SP+PP+ECD
MAGGSATTWGYPVALLLLVATLGLGRWLQPDPGLPGLRHSYDCGIKGMQLLVFPRPGQTLRFKVVDEFGNRFDVNNCSICYHWVTSRPQEPAVFSADYRGCHVLEKDGRFHLRVFMEAVLPNGRVDVAQDATLICPKPDPSRTLDSQLAPPAMFSVSTPQTLSFLPTSGHTSQGSGHAFPSPLDPGHSSVHPTPALPSPGPGPTLATLAQPHWGTLEHWDVNKRDYIGTHLSQEQCQVASGHLPCIVRRTSKEACQQAGCCYDNTREVPCYYGNTATVQCFRDGYFVLVVSQEMALTHRITLANIHLAYAPTSCSPTQHTEAFVVFYFPLTHCGTTMQVAGDQLIYENWLVSGIHIQKGPQGSITRDSTFQLHVRCVFNASDFLPIQASIFPPPSPAPMTQPGPLRLELRIAKDETFSSYYGEDDYPIVRLLREPVHVEVRLLQRTDPNLVLLLHQCWGAPSANPFQQPQWPILSDGCPFKGDSYRTQMVALDGATPFQSHYQRFTVATFALLDSGSQRALRGLVYLFCSTSACHTSGLETCSTACSTGTTRQRRSSGHRNDTARPQDIVSSPGPVGFEDSYGQEPTLGPTDSNGNSSLRP

SEQ ID NO: 3139 - protein, 716 aa, synthetic construct
  REGION 1..716: note = ZP2 (Q05996) SP+PP+ECD
MACRQRGGSWSPSGWFNAGWSTYRSISLFFALVTSGNSIDVSQLVNPAFPGTVTCDEREITVEFPSSPGTKKWHASVVDPLGLDMPNCTYILDPEKLTLRATYDNCTRRVHGGHQMTIRVMNNSAALRHGAVMYQFFCPAMQVEETQGLSASTICQKDFMSFSLPRVFSGLADDSKGTKVQMGWSIEVGDGARAKTLTLPEAMKEGFSLLIDNHRMTFHVPFNATGVTHYVQGNSHLYMVSLKLTFISPGQKVIFSSQAICAPDPVTCNATHMTLTIPEFPGKLKSVSFENQNIDVSQLHDNGIDLEATNGMKLHFSKTLLKTKLSEKCLLHQFYLASLKLTFLLRPETVSMVIYPECLCESPVSIVTGELCTQDGFMDVEVYSYQTQPALDLGTLRVGNSSCQPVFEAQSQGLVRFHIPLNGCGTRYKFEDDKVVYENEIHALWTDFPPSKISRDSEFRMTVKCSYSRNDMLLNINVESLTPPVASVKLGPFTLILQSYPDNSYQQPYGENEYPLVRFLRQPIYMEVRVLNRDDPNIKLVLDDCWATSTMDPDSFPQWNVVVDGCAYDLDNYQTTFHPVGSSVTHPDHYQRFDMKAFAFVSEAHVLSSLVYFHCSALICNRLSPDSPLCSVTCPVSSRHRRATGATEAEKMTVSLPGPILLLSDDSSFRGVGSSDLKASGSSGEKSRSETGEEVGSRGAMDTKGHKTAGDVGSKA

SEQ ID NO: 3140 - protein, 387 aa, synthetic construct
  REGION 1..387: note = ZP3 (P21754) SP+PP+ECD
MELSYRLFICLLLWGSTELCYPQPLWLLQGGASHPETSVQPVLVECQEATLMVMVSKDLFGTGKLIRAADLTLGPEACEPLVSMDTEDVVRFEVGLHECGNSMQVTDDALVYSTFLLHDPRPVGNLSIVRTNRAEIPIECRYPRQGNVSSQAILPTWLPFRTTVFSEEKLTFSLRLMEENWNAEKRSPTFHLGDAAHLQAEIHTGSHVPLRLFVDHCVATPTPDQNASPYHTIVDFHGCLVDGLTDASSAFKVPRPGPDTLQFTVDVFHFANDSRNMIYITCHLKVTLAEQDPDELNKACSFSKPSNSWFPVEGSADICQCCNKGDCGTPSHSRRQPHVMSQWSRSASRNRRHVTEEADVTVGPLIFLDRRGDHEVEQWALPSDTSV

SEQ ID NO: 3141 - protein, 505 aa, synthetic construct
  REGION 1..505: note = ZP4 (Q12836) SP+PP+ECD
MWLLRCVLLCVSLSLAVSGQHKPEAPDYSSVLHCGPWSFQFAVNLNQEATSPPVLIAWDNQGLLHELQNDSDCGTWIRKGPGSSVVLEATYSSCYVTEWDSHYIMPVGVEGAGAAEHKVVTERKLLKCPMDLLARDAPDTDWCDSIPARDRLPCAPSPISRGDCEGLGCCYSSEEVNSCYYGNTVTLHCTREGHFSIAVSRNVTSPPLLLDSVRLALRNDSACNPVMATQAFVLFQFPFTSCGTTRQITGDRAVYENELVATRDVKNGSRGSVTRDSIFRLHVSCSYSVSSNSLPINVQVFTLPPPFPETQPGPLTLELQIAKDKNYGSYYGVGDYPVVKLLRDPIYVEVSILHRTDPYLGLLLQQCWATPSTDPLSQPQWPILVKGCPYIGDNYQTQLIPVQKALDLPFPSHHQRFSIFTFSFVNPTVEKQALRGPVHLHCSVSVCQPAETPSCVVTCPDLSRRRNFDNSSQNTTASVSSKGPMILLQATKDPPEKLRVPVDSK

SEQ ID NO: 3142 - protein, 372 aa, synthetic construct
  REGION 1..372: note = ZPLD1 (Q8TCW7) SP+PP+ECD
MEQIWLLLLLTIRVLPGSAQFNGYNCDANLHSRFPAERDISVYCGVQAITMKINFCTVLFSGYSETDLALNGRHGDSHCRGFINNNTFPAVVIFIINLSTLEGCGNNLVVSTIPGVSAYGNATSVQVGNISGYIDTPDPPTIISYLPGLLYKFSCSYPLEYLVNNTQLASSSAAISVRENNGTFVSTLNLLLYNDSTYNQQLIIPSIGLPLKTKVFAAVQATNLDGRWNVLMDYCYTTPSGNPNDDIRYDLFLSCDKDPQTTVIENGRSQRGRFSFEVFRFVKHKNQKMSTVFLHCVTKLCRADDCPFLMPICSHRERRDAGRRTTWSPQSSSGSAVLSAGPIITRSDETPTNNSQLGSPSMPPFQLNAITS

SEQ ID NO: 3143 - protein, 8 aa, synthetic construct
  REGION 1..8: note = Gly-Ser Linker
GGGSGGGS

SEQ ID NO: 3144 - protein, 9 aa, synthetic construct
  REGION 1..9: note = Gly-Ser Linker
GGGSGGGSG

SEQ ID NO: 3145 - protein, 10 aa, synthetic construct
  REGION 1..10: note = Gly-Ser Linker
GGGSGGGSGG

SEQ ID NO: 3146 - protein, 11 aa, synthetic construct
  REGION 1..11: note = Gly-Ser Linker
GGGSGGGSGGG

SEQ ID NO: 3147 - protein, 12 aa, synthetic construct
  REGION 1..12: note = Gly-Ser Linker
GGGSGGGSGGGS

SEQ ID NO: 3148 - protein, 13 aa, synthetic construct
  REGION 1..13: note = Gly-Ser Linker
GGGSGGGSGGGSG

SEQ ID NO: 3149 - protein, 14 aa, synthetic construct
  REGION 1..14: note = Gly-Ser Linker
GGGSGGGSGGGSGG

SEQ ID NO: 3150 - protein, 15 aa, synthetic construct
  REGION 1..15: note = Gly-Ser Linker
GGGSGGGSGGGSGGG

SEQ ID NO: 3151 - protein, 16 aa, synthetic construct
  REGION 1..16: note = Gly-Ser Linker
GGGSGGGSGGGSGGGS

SEQ ID NO: 3152 - protein, 17 aa, synthetic construct
  REGION 1..17: note = Gly-Ser Linker
GGGSGGGSGGGSGGGSG

SEQ ID NO: 3153 - protein, 18 aa, synthetic construct
  REGION 1..18: note = Gly-Ser Linker
GGGSGGGSGGGSGGGSGG

SEQ ID NO: 3154 - protein, 19 aa, synthetic construct
  REGION 1..19: note = Gly-Ser Linker
GGGSGGGSGGGSGGGSGGG

SEQ ID NO: 3155 - protein, 20 aa, synthetic construct
  REGION 1..20: note = Gly-Ser Linker
GGGSGGGSGGGSGGGSGGGS

SEQ ID NO: 3156 - protein, 21 aa, synthetic construct
  REGION 1..21: note = Gly-Ser Linker
GGGSGGGSGGGSGGGSGGGSG

SEQ ID NO: 3157 - protein, 22 aa, synthetic construct
  REGION 1..22: note = Gly-Ser Linker
GGGSGGGSGGGSGGGSGGGSGG

SEQ ID NO: 3158 - protein, 23 aa, synthetic construct
  REGION 1..23: note = Gly-Ser Linker
GGGSGGGSGGGSGGGSGGGSGGG

SEQ ID NO: 3159 - protein, 24 aa, synthetic construct
  REGION 1..24: note = Gly-Ser Linker
GGGSGGGSGGGSGGGSGGGSGGGS

SEQ ID NO: 3160 - protein, 25 aa, synthetic construct
  REGION 1..25: note = Gly-Ser Linker
GGGSGGGSGGGSGGGSGGGSGGGSG

SEQ ID NO: 3161 - protein, 26 aa, synthetic construct
  REGION 1..26: note = Gly-Ser Linker
GGGSGGGSGGGSGGGSGGGSGGGSGG

SEQ ID NO: 3162 - protein, 27 aa, synthetic construct
  REGION 1..27: note = Gly-Ser Linker
GGGSGGGSGGGSGGGSGGGSGGGSGGG

SEQ ID NO: 3163 - protein, 5 aa, synthetic construct
  REGION 1..5: note = Gly-Ser Linker
GGGGS

SEQ ID NO: 3164 - protein, 6 aa, synthetic construct
  REGION 1..6: note = Gly-Ser Linker
GGGGSG

SEQ ID NO: 3165 - protein, 7 aa, synthetic construct
  REGION 1..7: note = Gly-Ser Linker
GGGGSGG

SEQ ID NO: 3166 - protein, 8 aa, synthetic construct
  REGION 1..8: note = Gly-Ser Linker
GGGGSGGG

SEQ ID NO: 3167 - protein, 10 aa, synthetic construct
  REGION 1..10: note = Gly-Ser Linker
GGGGSGGGGS

SEQ ID NO: 3168 - protein, 11 aa, synthetic construct
  REGION 1..11: note = Gly-Ser Linker
GGGGSGGGGSG

SEQ ID NO: 3169 - protein, 12 aa, synthetic construct
  REGION 1..12: note = Gly-Ser Linker
GGGGSGGGGSGG

SEQ ID NO: 3170 - protein, 13 aa, synthetic construct
  REGION 1..13: note = Gly-Ser Linker
GGGGSGGGGSGGG

SEQ ID NO: 3171 - protein, 15 aa, synthetic construct
  REGION 1..15: note = Gly-Ser Linker
GGGGSGGGGSGGGGS

SEQ ID NO: 3172 - protein, 16 aa, synthetic construct
  REGION 1..16: note = Gly-Ser Linker
GGGGSGGGGSGGGGSG

SEQ ID NO: 3173 - protein, 17 aa, synthetic construct
  REGION 1..17: note = Gly-Ser Linker
GGGGSGGGGSGGGGSGG

SEQ ID NO: 3174 - protein, 18 aa, synthetic construct
  REGION 1..18: note = Gly-Ser Linker
GGGGSGGGGSGGGGSGGG

SEQ ID NO: 3175 - protein, 20 aa, synthetic construct
  REGION 1..20: note = Gly-Ser Linker
GGGGSGGGGSGGGGSGGGGS

SEQ ID NO: 3176 - protein, 21 aa, synthetic construct
  REGION 1..21: note = Gly-Ser Linker
GGGGSGGGGSGGGGSGGGGSG

SEQ ID NO: 3177 - protein, 22 aa, synthetic construct
  REGION 1..22: note = Gly-Ser Linker
GGGGSGGGGSGGGGSGGGGSGG

SEQ ID NO: 3178 - protein, 23 aa, synthetic construct
  REGION 1..23: note = Gly-Ser Linker
GGGGSGGGGSGGGGSGGGGSGGG

SEQ ID NO: 3179 - protein, 25 aa, synthetic construct
  REGION 1..25: note = Gly-Ser Linker
GGGGSGGGGSGGGGSGGGGSGGGGS

SEQ ID NO: 3180 - protein, 26 aa, synthetic construct
  REGION 1..26: note = Gly-Ser Linker
GGGGSGGGGSGGGGSGGGGSGGGGSG

SEQ ID NO: 3181 - protein, 27 aa, synthetic construct
  REGION 1..27: note = Gly-Ser Linker
GGGGSGGGGSGGGGSGGGGSGGGGSGG

SEQ ID NO: 3182 - protein, 28 aa, synthetic construct
  REGION 1..28: note = Gly-Ser Linker
GGGGSGGGGSGGGGSGGGGSGGGGSGGG

SEQ ID NO: 3183 - protein, 4 aa, synthetic construct
  REGION 1..4: note = Gly-Ala Linker
GGGA

SEQ ID NO: 3184 - protein, 5 aa, synthetic construct
  REGION 1..5: note = Gly-Ala Linker
GGGAG

SEQ ID NO: 3185 - protein, 6 aa, synthetic construct
  REGION 1..6: note = Gly-Ala Linker
GGGAGG

SEQ ID NO: 3186 - protein, 7 aa, synthetic construct
  REGION 1..7: note = Gly-Ala Linker
GGGAGGG

SEQ ID NO: 3187 - protein, 8 aa, synthetic construct
  REGION 1..8: note = Gly-Ala Linker
GGGAGGGA

SEQ ID NO: 3188 - protein, 9 aa, synthetic construct
  REGION 1..9: note = Gly-Ala Linker
GGGAGGGAG

SEQ ID NO: 3189 - protein, 10 aa, synthetic construct
  REGION 1..10: note = Gly-Ala Linker
GGGAGGGAGG

SEQ ID NO: 3190 - protein, 11 aa, synthetic construct
  REGION 1..11: note = Gly-Ala Linker
GGGAGGGAGGG

SEQ ID NO: 3191 - protein, 12 aa, synthetic construct
  REGION 1..12: note = Gly-Ala Linker
GGGAGGGAGGGA

SEQ ID NO: 3192 - protein, 13 aa, synthetic construct
  REGION 1..13: note = Gly-Ala Linker
GGGAGGGAGGGAG

SEQ ID NO: 3193 - protein, 14 aa, synthetic construct
  REGION 1..14: note = Gly-Ala Linker
GGGAGGGAGGGAGG

SEQ ID NO: 3194 - protein, 15 aa, synthetic construct
  REGION 1..15: note = Gly-Ala Linker
GGGAGGGAGGGAGGG

SEQ ID NO: 3195 - protein, 16 aa, synthetic construct
  REGION 1..16: note = Gly-Ala Linker
GGGAGGGAGGGAGGGA

SEQ ID NO: 3196 - protein, 17 aa, synthetic construct
  REGION 1..17: note = Gly-Ala Linker
GGGAGGGAGGGAGGGAG

SEQ ID NO: 3197 - protein, 18 aa, synthetic construct
  REGION 1..18: note = Gly-Ala Linker
GGGAGGGAGGGAGGGAGG

SEQ ID NO: 3198 - protein, 19 aa, synthetic construct
  REGION 1..19: note = Gly-Ala Linker
GGGAGGGAGGGAGGGAGGG

SEQ ID NO: 3199 - protein, 20 aa, synthetic construct
  REGION 1..20: note = Gly-Ala Linker
GGGAGGGAGGGAGGGAGGGA

SEQ ID NO: 3200 - protein, 21 aa, synthetic construct
  REGION 1..21: note = Gly-Ala Linker
GGGAGGGAGGGAGGGAGGGAG

SEQ ID NO: 3201 - protein, 22 aa, synthetic construct
  REGION 1..22: note = Gly-Ala Linker
GGGAGGGAGGGAGGGAGGGAGG

SEQ ID NO: 3202 - protein, 23 aa, synthetic construct
  REGION 1..23: note = Gly-Ala Linker
GGGAGGGAGGGAGGGAGGGAGGG

SEQ ID NO: 3203 - protein, 24 aa, synthetic construct
  REGION 1..24: note = Gly-Ala Linker
GGGAGGGAGGGAGGGAGGGAGGGA

SEQ ID NO: 3204 - protein, 25 aa, synthetic construct
  REGION 1..25: note = Gly-Ala Linker
GGGAGGGAGGGAGGGAGGGAGGGAG

SEQ ID NO: 3205 - protein, 26 aa, synthetic construct
  REGION 1..26: note = Gly-Ala Linker
GGGAGGGAGGGAGGGAGGGAGGGAGG

SEQ ID NO: 3206 - protein, 27 aa, synthetic construct
  REGION 1..27: note = Gly-Ala Linker
GGGAGGGAGGGAGGGAGGGAGGGAGGG

SEQ ID NO: 3207 - protein, 5 aa, synthetic construct
  REGION 1..5: note = Gly-Ala Linker
GGGGA

SEQ ID NO: 3208 - protein, 6 aa, synthetic construct
  REGION 1..6: note = Gly-Ala Linker
GGGGAG

SEQ ID NO: 3209 - protein, 7 aa, synthetic construct
  REGION 1..7: note = Gly-Ala Linker
GGGGAGG

SEQ ID NO: 3210 - protein, 8 aa, synthetic construct
  REGION 1..8: note = Gly-Ala Linker
GGGGAGGG

SEQ ID NO: 3211 - protein, 10 aa, synthetic construct
  REGION 1..10: note = Gly-Ala Linker
GGGGAGGGGA

SEQ ID NO: 3212 - protein, 11 aa, synthetic construct
  REGION 1..11: note = Gly-Ala Linker
GGGGAGGGGAG

SEQ ID NO: 3213 - protein, 12 aa, synthetic construct
  REGION 1..12: note = Gly-Ala Linker
GGGGAGGGGAGG

SEQ ID NO: 3214 - protein, 13 aa, synthetic construct
  REGION 1..13: note = Gly-Ala Linker
GGGGAGGGGAGGG

SEQ ID NO: 3215 - protein, 15 aa, synthetic construct
  REGION 1..15: note = Gly-Ala Linker
GGGGAGGGGAGGGGA

SEQ ID NO: 3216 - protein, 16 aa, synthetic construct
  REGION 1..16: note = Gly-Ala Linker
GGGGAGGGGAGGGGAG

SEQ ID NO: 3217 - protein, 17 aa, synthetic construct
  REGION 1..17: note = Gly-Ala Linker
GGGGAGGGGAGGGGAGG

SEQ ID NO: 3218 - protein, 18 aa, synthetic construct
  REGION 1..18: note = Gly-Ala Linker
GGGGAGGGGAGGGGAGGG

SEQ ID NO: 3219 - protein, 20 aa, synthetic construct
  REGION 1..20: note = Gly-Ala Linker
GGGGAGGGGAGGGGAGGGGA

SEQ ID NO: 3220 - protein, 21 aa, synthetic construct
  REGION 1..21: note = Gly-Ala Linker
GGGGAGGGGAGGGGAGGGGAG

SEQ ID NO: 3221 - protein, 22 aa, synthetic construct
  REGION 1..22: note = Gly-Ala Linker
GGGGAGGGGAGGGGAGGGGAGG

SEQ ID NO: 3222 - protein, 23 aa, synthetic construct
  REGION 1..23: note = Gly-Ala Linker
GGGGAGGGGAGGGGAGGGGAGGG

SEQ ID NO: 3223 - protein, 25 aa, synthetic construct
  REGION 1..25: note = Gly-Ala Linker
GGGGAGGGGAGGGGAGGGGAGGGGA

SEQ ID NO: 3224 - protein, 26 aa, synthetic construct
  REGION 1..26: note = Gly-Ala Linker
GGGGAGGGGAGGGGAGGGGAGGGGAG

SEQ ID NO: 3225 - protein, 27 aa, synthetic construct
  REGION 1..27: note = Gly-Ala Linker
GGGGAGGGGAGGGGAGGGGAGGGGAGG

SEQ ID NO: 3226 - protein, 28 aa, synthetic construct
  REGION 1..28: note = Gly-Ala Linker
GGGGAGGGGAGGGGAGGGGAGGGGAGGG

SEQ ID NO: 3227 - protein, 57 aa, synthetic construct
  REGION 1..57: note = TNR1B Linker (1-57)
TSTSPTRSMAPGAVHLPQPVSTRSQHTQPTPEPSTAPSTSFLLPMGPSPPAEGSTGD

SEQ ID NO: 3228 - protein, 56 aa, synthetic construct
  REGION 1..56: note = TNR1B Linker (2-57)
STSPTRSMAPGAVHLPQPVSTRSQHTQPTPEPSTAPSTSFLLPMGPSPPAEGSTGD

SEQ ID NO: 3229 - protein, 55 aa, synthetic construct
  REGION 1..55: note = TNR1B Linker (3-57)
TSPTRSMAPGAVHLPQPVSTRSQHTQPTPEPSTAPSTSFLLPMGPSPPAEGSTGD

SEQ ID NO: 3230 - protein, 54 aa, synthetic construct
  REGION 1..54: note = TNR1B Linker (4-57)
SPTRSMAPGAVHLPQPVSTRSQHTQPTPEPSTAPSTSFLLPMGPSPPAEGSTGD

SEQ ID NO: 3231 - protein, 53 aa, synthetic construct
  REGION 1..53: note = TNR1B Linker (5-57)
PTRSMAPGAVHLPQPVSTRSQHTQPTPEPSTAPSTSFLLPMGPSPPAEGSTGD

SEQ ID NO: 3232 - protein, 52 aa, synthetic construct
  REGION 1..52: note = TNR1B Linker (6-57)
TRSMAPGAVHLPQPVSTRSQHTQPTPEPSTAPSTSFLLPMGPSPPAEGSTGD

SEQ ID NO: 3233 - protein, 51 aa, synthetic construct
  REGION 1..51: note = TNR1B Linker (7-57)
RSMAPGAVHLPQPVSTRSQHTQPTPEPSTAPSTSFLLPMGPSPPAEGSTGD

SEQ ID NO: 3234 - protein, 50 aa, synthetic construct
  REGION 1..50: note = TNR1B Linker (8-57)
SMAPGAVHLPQPVSTRSQHTQPTPEPSTAPSTSFLLPMGPSPPAEGSTGD

SEQ ID NO: 3235 - protein, 49 aa, synthetic construct
  REGION 1..49: note = TNR1B Linker (9-57)
MAPGAVHLPQPVSTRSQHTQPTPEPSTAPSTSFLLPMGPSPPAEGSTGD

SEQ ID NO: 3236 - protein, 48 aa, synthetic construct
  REGION 1..48: note = TNR1B Linker (10-57)
APGAVHLPQPVSTRSQHTQPTPEPSTAPSTSFLLPMGPSPPAEGSTGD

SEQ ID NO: 3237 - protein, 47 aa, synthetic construct
  REGION 1..47: note = TNR1B Linker (11-57)
PGAVHLPQPVSTRSQHTQPTPEPSTAPSTSFLLPMGPSPPAEGSTGD

SEQ ID NO: 3238 - protein, 46 aa, synthetic construct
  REGION 1..46: note = TNR1B Linker (12-57)
GAVHLPQPVSTRSQHTQPTPEPSTAPSTSFLLPMGPSPPAEGSTGD

SEQ ID NO: 3239 - protein, 45 aa, synthetic construct
  REGION 1..45: note = TNR1B Linker (13-57)
AVHLPQPVSTRSQHTQPTPEPSTAPSTSFLLPMGPSPPAEGSTGD

SEQ ID NO: 3240 - protein, 44 aa, synthetic construct
  REGION 1..44: note = TNR1B Linker (14-57)
VHLPQPVSTRSQHTQPTPEPSTAPSTSFLLPMGPSPPAEGSTGD

SEQ ID NO: 3241 - protein, 43 aa, synthetic construct
  REGION 1..43: note = TNR1B Linker (15-57)
HLPQPVSTRSQHTQPTPEPSTAPSTSFLLPMGPSPPAEGSTGD

SEQ ID NO: 3242 - protein, 42 aa, synthetic construct
  REGION 1..42: note = TNR1B Linker (16-57)
LPQPVSTRSQHTQPTPEPSTAPSTSFLLPMGPSPPAEGSTGD

SEQ ID NO: 3243 - protein, 41 aa, synthetic construct
  REGION 1..41: note = TNR1B Linker (17-57)
PQPVSTRSQHTQPTPEPSTAPSTSFLLPMGPSPPAEGSTGD

SEQ ID NO: 3244 - protein, 40 aa, synthetic construct
  REGION 1..40: note = TNR1B Linker (18-57)
QPVSTRSQHTQPTPEPSTAPSTSFLLPMGPSPPAEGSTGD

SEQ ID NO: 3245 - protein, 39 aa, synthetic construct
  REGION 1..39: note = TNR1B Linker (19-57)
PVSTRSQHTQPTPEPSTAPSTSFLLPMGPSPPAEGSTGD

SEQ ID NO: 3246 - protein, 38 aa, synthetic construct
  REGION 1..38: note = TNR1B Linker (20-57)
VSTRSQHTQPTPEPSTAPSTSFLLPMGPSPPAEGSTGD

SEQ ID NO: 3247 - protein, 37 aa, synthetic construct
  REGION 1..37: note = TNR1B Linker (21-57)
STRSQHTQPTPEPSTAPSTSFLLPMGPSPPAEGSTGD

SEQ ID NO: 3248 - protein, 36 aa, synthetic construct
  REGION 1..36: note = TNR1B Linker (22-57)
TRSQHTQPTPEPSTAPSTSFLLPMGPSPPAEGSTGD

SEQ ID NO: 3249 - protein, 35 aa, synthetic construct
  REGION 1..35: note = TNR1B Linker (23-57)
RSQHTQPTPEPSTAPSTSFLLPMGPSPPAEGSTGD

SEQ ID NO: 3250 - protein, 34 aa, synthetic construct
  REGION 1..34: note = TNR1B Linker (24-57)
SQHTQPTPEPSTAPSTSFLLPMGPSPPAEGSTGD

SEQ ID NO: 3251 - protein, 33 aa, synthetic construct
  REGION 1..33: note = TNR1B Linker (25-57)
QHTQPTPEPSTAPSTSFLLPMGPSPPAEGSTGD

SEQ ID NO: 3252 - protein, 32 aa, synthetic construct
  REGION 1..32: note = TNR1B Linker (26-57)
HTQPTPEPSTAPSTSFLLPMGPSPPAEGSTGD

SEQ ID NO: 3253 - protein, 31 aa, synthetic construct
  REGION 1..31: note = TNR1B Linker (27-57)
TQPTPEPSTAPSTSFLLPMGPSPPAEGSTGD

SEQ ID NO: 3254 - protein, 30 aa, synthetic construct
  REGION 1..30: note = TNR1B Linker (28-57)
QPTPEPSTAPSTSFLLPMGPSPPAEGSTGD

SEQ ID NO: 3255 - protein, 29 aa, synthetic construct
  REGION 1..29: note = TNR1B Linker (29-57)
PTPEPSTAPSTSFLLPMGPSPPAEGSTGD

SEQ ID NO: 3256 - protein, 28 aa, synthetic construct
  REGION 1..28: note = TNR1B Linker (30-57)
TPEPSTAPSTSFLLPMGPSPPAEGSTGD

SEQ ID NO: 3257 - protein, 27 aa, synthetic construct
  REGION 1..27: note = TNR1B Linker (31-57)
PEPSTAPSTSFLLPMGPSPPAEGSTGD

SEQ ID NO: 3258 - protein, 26 aa, synthetic construct
  REGION 1..26: note = TNR1B Linker (32-57)
EPSTAPSTSFLLPMGPSPPAEGSTGD

SEQ ID NO: 3259 - protein, 25 aa, synthetic construct
  REGION 1..25: note = TNR1B Linker (33-57)
PSTAPSTSFLLPMGPSPPAEGSTGD

SEQ ID NO: 3260 - protein, 24 aa, synthetic construct
  REGION 1..24: note = TNR1B Linker (34-57)
STAPSTSFLLPMGPSPPAEGSTGD

SEQ ID NO: 3261 - protein, 23 aa, synthetic construct
  REGION 1..23: note = TNR1B Linker (35-57)
TAPSTSFLLPMGPSPPAEGSTGD

SEQ ID NO: 3262 - protein, 22 aa, synthetic construct
  REGION 1..22: note = TNR1B Linker (36-57)
APSTSFLLPMGPSPPAEGSTGD

SEQ ID NO: 3263 - protein, 21 aa, synthetic construct
  REGION 1..21: note = TNR1B Linker (37-57)
PSTSFLLPMGPSPPAEGSTGD

SEQ ID NO: 3264 - protein, 20 aa, synthetic construct
  REGION 1..20: note = TNR1B Linker (38-57)
STSFLLPMGPSPPAEGSTGD

SEQ ID NO: 3265 - protein, 19 aa, synthetic construct
  REGION 1..19: note = TNR1B Linker (39-57)
TSFLLPMGPSPPAEGSTGD

SEQ ID NO: 3266 - protein, 18 aa, synthetic construct
  REGION 1..18: note = TNR1B Linker (40-57)
SFLLPMGPSPPAEGSTGD

SEQ ID NO: 3267 - protein, 17 aa, synthetic construct
  REGION 1..17: note = TNR1B Linker (41-57)
FLLPMGPSPPAEGSTGD

SEQ ID NO: 3268 - protein, 16 aa, synthetic construct
  REGION 1..16: note = TNR1B Linker (42-57)
LLPMGPSPPAEGSTGD

SEQ ID NO: 3269 - protein, 15 aa, synthetic construct
  REGION 1..15: note = TNR1B Linker (43-57)
LPMGPSPPAEGSTGD

SEQ ID NO: 3270 - protein, 14 aa, synthetic construct
  REGION 1..14: note = TNR1B Linker (44-57)
PMGPSPPAEGSTGD

SEQ ID NO: 3271 - protein, 13 aa, synthetic construct
  REGION 1..13: note = TNR1B Linker (45-57)
MGPSPPAEGSTGD

SEQ ID NO: 3272 - protein, 12 aa, synthetic construct
  REGION 1..12: note = TNR1B Linker (46-57)
GPSPPAEGSTGD

SEQ ID NO: 3273 - protein, 11 aa, synthetic construct
  REGION 1..11: note = TNR1B Linker (47-57)
PSPPAEGSTGD

SEQ ID NO: 3274 - protein, 10 aa, synthetic construct
  REGION 1..10: note = TNR1B Linker (48-57)
SPPAEGSTGD

SEQ ID NO: 3275 - protein, 9 aa, synthetic construct
  REGION 1..9: note = TNR1B Linker (49-57)
PPAEGSTGD

SEQ ID NO: 3276 - protein, 8 aa, synthetic construct
  REGION 1..8: note = TNR1B Linker (50-57)
PAEGSTGD

SEQ ID NO: 3277 - protein, 7 aa, synthetic construct
  REGION 1..7: note = TNR1B Linker (51-57)
AEGSTGD

SEQ ID NO: 3278 - protein, 6 aa, synthetic construct
  REGION 1..6: note = TNR1B Linker (52-57)
EGSTGD

SEQ ID NO: 3279 - protein, 5 aa, synthetic construct
  REGION 1..5: note = TNR1B Linker (53-57)
GSTGD

SEQ ID NO: 3280 - protein, 56 aa, synthetic construct
  REGION 1..56: note = TNR1B Linker (1-56)
TSTSPTRSMAPGAVHLPQPVSTRSQHTQPTPEPSTAPSTSFLLPMGPSPPAEGSTG

SEQ ID NO: 3281 - protein, 55 aa, synthetic construct
  REGION 1..55: note = TNR1B Linker (2-56)
STSPTRSMAPGAVHLPQPVSTRSQHTQPTPEPSTAPSTSFLLPMGPSPPAEGSTG

SEQ ID NO: 3282 - protein, 54 aa, synthetic construct
  REGION 1..54: note = TNR1B Linker (3-56)
TSPTRSMAPGAVHLPQPVSTRSQHTQPTPEPSTAPSTSFLLPMGPSPPAEGSTG

SEQ ID NO: 3283 - protein, 53 aa, synthetic construct
  REGION 1..53: note = TNR1B Linker (4-56)
SPTRSMAPGAVHLPQPVSTRSQHTQPTPEPSTAPSTSFLLPMGPSPPAEGSTG

SEQ ID NO: 3284 - protein, 52 aa, synthetic construct
  REGION 1..52: note = TNR1B Linker (5-56)
PTRSMAPGAVHLPQPVSTRSQHTQPTPEPSTAPSTSFLLPMGPSPPAEGSTG

SEQ ID NO: 3285 - protein, 51 aa, synthetic construct
  REGION 1..51: note = TNR1B Linker (6-56)
TRSMAPGAVHLPQPVSTRSQHTQPTPEPSTAPSTSFLLPMGPSPPAEGSTG

SEQ ID NO: 3286 - protein, 50 aa, synthetic construct
  REGION 1..50: note = TNR1B Linker (7-56)
RSMAPGAVHLPQPVSTRSQHTQPTPEPSTAPSTSFLLPMGPSPPAEGSTG

SEQ ID NO: 3287 - protein, 49 aa, synthetic construct
  REGION 1..49: note = TNR1B Linker (8-56)
SMAPGAVHLPQPVSTRSQHTQPTPEPSTAPSTSFLLPMGPSPPAEGSTG

SEQ ID NO: 3288 - protein, 48 aa, synthetic construct
  REGION 1..48: note = TNR1B Linker (9-56)
MAPGAVHLPQPVSTRSQHTQPTPEPSTAPSTSFLLPMGPSPPAEGSTG

SEQ ID NO: 3289 - protein, 47 aa, synthetic construct
  REGION 1..47: note = TNR1B Linker (10-56)
APGAVHLPQPVSTRSQHTQPTPEPSTAPSTSFLLPMGPSPPAEGSTG

SEQ ID NO: 3290 - protein, 46 aa, synthetic construct
  REGION 1..46: note = TNR1B Linker (11-56)
PGAVHLPQPVSTRSQHTQPTPEPSTAPSTSFLLPMGPSPPAEGSTG

SEQ ID NO: 3291 - protein, 45 aa, synthetic construct
  REGION 1..45: note = TNR1B Linker (12-56)
GAVHLPQPVSTRSQHTQPTPEPSTAPSTSFLLPMGPSPPAEGSTG

SEQ ID NO: 3292 - protein, 44 aa, synthetic construct
  REGION 1..44: note = TNR1B Linker (13-56)
AVHLPQPVSTRSQHTQPTPEPSTAPSTSFLLPMGPSPPAEGSTG

SEQ ID NO: 3293 - protein, 43 aa, synthetic construct
  REGION 1..43: note = TNR1B Linker (14-56)
VHLPQPVSTRSQHTQPTPEPSTAPSTSFLLPMGPSPPAEGSTG

SEQ ID NO: 3294 - protein, 42 aa, synthetic construct
  REGION 1..42: note = TNR1B Linker (15-56)
HLPQPVSTRSQHTQPTPEPSTAPSTSFLLPMGPSPPAEGSTG

SEQ ID NO: 3295 - protein, 41 aa, synthetic construct
  REGION 1..41: note = TNR1B Linker (16-56)
LPQPVSTRSQHTQPTPEPSTAPSTSFLLPMGPSPPAEGSTG

SEQ ID NO: 3296 - protein, 40 aa, synthetic construct
  REGION 1..40: note = TNR1B Linker (17-56)
PQPVSTRSQHTQPTPEPSTAPSTSFLLPMGPSPPAEGSTG

SEQ ID NO: 3297 - protein, 39 aa, synthetic construct
  REGION 1..39: note = TNR1B Linker (18-56)
QPVSTRSQHTQPTPEPSTAPSTSFLLPMGPSPPAEGSTG

SEQ ID NO: 3298 - protein, 38 aa, synthetic construct
  REGION 1..38: note = TNR1B Linker (19-56)
PVSTRSQHTQPTPEPSTAPSTSFLLPMGPSPPAEGSTG

SEQ ID NO: 3299 - protein, 37 aa, synthetic construct
  REGION 1..37: note = TNR1B Linker (20-56)
VSTRSQHTQPTPEPSTAPSTSFLLPMGPSPPAEGSTG

SEQ ID NO: 3300 - protein, 36 aa, synthetic construct
  REGION 1..36: note = TNR1B Linker (21-56)
STRSQHTQPTPEPSTAPSTSFLLPMGPSPPAEGSTG

SEQ ID NO: 3301 - protein, 35 aa, synthetic construct
  REGION 1..35: note = TNR1B Linker (22-56)
TRSQHTQPTPEPSTAPSTSFLLPMGPSPPAEGSTG

SEQ ID NO: 3302 - protein, 34 aa, synthetic construct
  REGION 1..34: note = TNR1B Linker (23-56)
RSQHTQPTPEPSTAPSTSFLLPMGPSPPAEGSTG

SEQ ID NO: 3303 - protein, 33 aa, synthetic construct
  REGION 1..33: note = TNR1B Linker (24-56)
SQHTQPTPEPSTAPSTSFLLPMGPSPPAEGSTG

SEQ ID NO: 3304 - protein, 32 aa, synthetic construct
  REGION 1..32: note = TNR1B Linker (25-56)
QHTQPTPEPSTAPSTSFLLPMGPSPPAEGSTG

SEQ ID NO: 3305 - protein, 31 aa, synthetic construct
  REGION 1..31: note = TNR1B Linker (26-56)
HTQPTPEPSTAPSTSFLLPMGPSPPAEGSTG

SEQ ID NO: 3306 - protein, 30 aa, synthetic construct
  REGION 1..30: note = TNR1B Linker (27-56)
TQPTPEPSTAPSTSFLLPMGPSPPAEGSTG

SEQ ID NO: 3307 - protein, 29 aa, synthetic construct
  REGION 1..29: note = TNR1B Linker (28-56)
QPTPEPSTAPSTSFLLPMGPSPPAEGSTG

SEQ ID NO: 3308 - protein, 28 aa, synthetic construct
  REGION 1..28: note = TNR1B Linker (29-56)
PTPEPSTAPSTSFLLPMGPSPPAEGSTG

SEQ ID NO: 3309 - protein, 27 aa, synthetic construct
  REGION 1..27: note = TNR1B Linker (30-56)
TPEPSTAPSTSFLLPMGPSPPAEGSTG

SEQ ID NO: 3310 - protein, 26 aa, synthetic construct
  REGION 1..26: note = TNR1B Linker (31-56)
PEPSTAPSTSFLLPMGPSPPAEGSTG

SEQ ID NO: 3311 - protein, 25 aa, synthetic construct
  REGION 1..25: note = TNR1B Linker (32-56)
EPSTAPSTSFLLPMGPSPPAEGSTG

SEQ ID NO: 3312 - protein, 24 aa, synthetic construct
  REGION 1..24: note = TNR1B Linker (33-56)
PSTAPSTSFLLPMGPSPPAEGSTG

SEQ ID NO: 3313 - protein, 23 aa, synthetic construct
  REGION 1..23: note = TNR1B Linker (34-56)
STAPSTSFLLPMGPSPPAEGSTG

SEQ ID NO: 3314 - protein, 22 aa, synthetic construct
  REGION 1..22: note = TNR1B Linker (35-56)
TAPSTSFLLPMGPSPPAEGSTG

SEQ ID NO: 3315 - protein, 21 aa, synthetic construct
  REGION 1..21: note = TNR1B Linker (36-56)
APSTSFLLPMGPSPPAEGSTG

SEQ ID NO: 3316 - protein, 20 aa, synthetic construct
  REGION 1..20: note = TNR1B Linker (37-56)
PSTSFLLPMGPSPPAEGSTG

SEQ ID NO: 3317 - protein, 19 aa, synthetic construct
  REGION 1..19: note = TNR1B Linker (38-56)
STSFLLPMGPSPPAEGSTG

SEQ ID NO: 3318 - protein, 18 aa, synthetic construct
  REGION 1..18: note = TNR1B Linker (39-56)
TSFLLPMGPSPPAEGSTG

SEQ ID NO: 3319 - protein, 17 aa, synthetic construct
  REGION 1..17: note = TNR1B Linker (40-56)
SFLLPMGPSPPAEGSTG

SEQ ID NO: 3320 - protein, 16 aa, synthetic construct
  REGION 1..16: note = TNR1B Linker (41-56)
FLLPMGPSPPAEGSTG

SEQ ID NO: 3321 - protein, 15 aa, synthetic construct
  REGION 1..15: note = TNR1B Linker (42-56)
LLPMGPSPPAEGSTG

SEQ ID NO: 3322 - protein, 14 aa, synthetic construct
  REGION 1..14: note = TNR1B Linker (43-56)
LPMGPSPPAEGSTG

SEQ ID NO: 3323 - protein, 13 aa, synthetic construct
  REGION 1..13: note = TNR1B Linker (44-56)
PMGPSPPAEGSTG

SEQ ID NO: 3324 - protein, 12 aa, synthetic construct
  REGION 1..12: note = TNR1B Linker (45-56)
MGPSPPAEGSTG

SEQ ID NO: 3325 - protein, 11 aa, synthetic construct
  REGION 1..11: note = TNR1B Linker (46-56)
GPSPPAEGSTG

SEQ ID NO: 3326 - protein, 10 aa, synthetic construct
  REGION 1..10: note = TNR1B Linker (47-56)
PSPPAEGSTG

SEQ ID NO: 3327 - protein, 9 aa, synthetic construct
  REGION 1..9: note = TNR1B Linker (48-56)
SPPAEGSTG

SEQ ID NO: 3328 - protein, 8 aa, synthetic construct
  REGION 1..8: note = TNR1B Linker (49-56)
PPAEGSTG

SEQ ID NO: 3329 - protein, 7 aa, synthetic construct
  REGION 1..7: note = TNR1B Linker (50-56)
PAEGSTG

SEQ ID NO: 3330 - protein, 6 aa, synthetic construct
  REGION 1..6: note = TNR1B Linker (51-56)
AEGSTG

SEQ ID NO: 3331 - protein, 5 aa, synthetic construct
  REGION 1..5: note = TNR1B Linker (52-56)
EGSTG

SEQ ID NO: 3332 - protein, 55 aa, synthetic construct
  REGION 1..55: note = TNR1B Linker (1-55)
TSTSPTRSMAPGAVHLPQPVSTRSQHTQPTPEPSTAPSTSFLLPMGPSPPAEGST

SEQ ID NO: 3333 - protein, 54 aa, synthetic construct
  REGION 1..54: note = TNR1B Linker (2-55)
STSPTRSMAPGAVHLPQPVSTRSQHTQPTPEPSTAPSTSFLLPMGPSPPAEGST

SEQ ID NO: 3334 - protein, 53 aa, synthetic construct
  REGION 1..53: note = TNR1B Linker (3-55)
TSPTRSMAPGAVHLPQPVSTRSQHTQPTPEPSTAPSTSFLLPMGPSPPAEGST

SEQ ID NO: 3335 - protein, 52 aa, synthetic construct
  REGION 1..52: note = TNR1B Linker (4-55)
SPTRSMAPGAVHLPQPVSTRSQHTQPTPEPSTAPSTSFLLPMGPSPPAEGST

SEQ ID NO: 3336 - protein, 51 aa, synthetic construct
  REGION 1..51: note = TNR1B Linker (5-55)
PTRSMAPGAVHLPQPVSTRSQHTQPTPEPSTAPSTSFLLPMGPSPPAEGST

SEQ ID NO: 3337 - protein, 50 aa, synthetic construct
  REGION 1..50: note = TNR1B Linker (6-55)
TRSMAPGAVHLPQPVSTRSQHTQPTPEPSTAPSTSFLLPMGPSPPAEGST

SEQ ID NO: 3338 - protein, 49 aa, synthetic construct
  REGION 1..49: note = TNR1B Linker (7-55)
RSMAPGAVHLPQPVSTRSQHTQPTPEPSTAPSTSFLLPMGPSPPAEGST

SEQ ID NO: 3339 - protein, 48 aa, synthetic construct
  REGION 1..48: note = TNR1B Linker (8-55)
SMAPGAVHLPQPVSTRSQHTQPTPEPSTAPSTSFLLPMGPSPPAEGST

SEQ ID NO: 3340 - protein, 47 aa, synthetic construct
  REGION 1..47: note = TNR1B Linker (9-55)
MAPGAVHLPQPVSTRSQHTQPTPEPSTAPSTSFLLPMGPSPPAEGST

SEQ ID NO: 3341 - protein, 46 aa, synthetic construct
  REGION 1..46: note = TNR1B Linker (10-55)
APGAVHLPQPVSTRSQHTQPTPEPSTAPSTSFLLPMGPSPPAEGST

SEQ ID NO: 3342 - protein, 45 aa, synthetic construct
  REGION 1..45: note = TNR1B Linker (11-55)
PGAVHLPQPVSTRSQHTQPTPEPSTAPSTSFLLPMGPSPPAEGST

SEQ ID NO: 3343 - protein, 44 aa, synthetic construct
  REGION 1..44: note = TNR1B Linker (12-55)
GAVHLPQPVSTRSQHTQPTPEPSTAPSTSFLLPMGPSPPAEGST

SEQ ID NO: 3344 - protein, 43 aa, synthetic construct
  REGION 1..43: note = TNR1B Linker (13-55)
AVHLPQPVSTRSQHTQPTPEPSTAPSTSFLLPMGPSPPAEGST

SEQ ID NO: 3345 - protein, 42 aa, synthetic construct
  REGION 1..42: note = TNR1B Linker (14-55)
VHLPQPVSTRSQHTQPTPEPSTAPSTSFLLPMGPSPPAEGST

SEQ ID NO: 3346 - protein, 41 aa, synthetic construct
  REGION 1..41: note = TNR1B Linker (15-55)
HLPQPVSTRSQHTQPTPEPSTAPSTSFLLPMGPSPPAEGST

SEQ ID NO: 3347 - protein, 40 aa, synthetic construct
  REGION 1..40: note = TNR1B Linker (16-55)
LPQPVSTRSQHTQPTPEPSTAPSTSFLLPMGPSPPAEGST

SEQ ID NO: 3348 - protein, 39 aa, synthetic construct
  REGION 1..39: note = TNR1B Linker (17-55)
PQPVSTRSQHTQPTPEPSTAPSTSFLLPMGPSPPAEGST

SEQ ID NO: 3349 - protein, 38 aa, synthetic construct
  REGION 1..38: note = TNR1B Linker (18-55)
QPVSTRSQHTQPTPEPSTAPSTSFLLPMGPSPPAEGST

SEQ ID NO: 3350 - protein, 37 aa, synthetic construct
  REGION 1..37: note = TNR1B Linker (19-55)
PVSTRSQHTQPTPEPSTAPSTSFLLPMGPSPPAEGST

SEQ ID NO: 3351 - protein, 36 aa, synthetic construct
  REGION 1..36: note = TNR1B Linker (20-55)
VSTRSQHTQPTPEPSTAPSTSFLLPMGPSPPAEGST

SEQ ID NO: 3352 - protein, 35 aa, synthetic construct
  REGION 1..35: note = TNR1B Linker (21-55)
STRSQHTQPTPEPSTAPSTSFLLPMGPSPPAEGST

SEQ ID NO: 3353 - protein, 34 aa, synthetic construct
  REGION 1..34: note = TNR1B Linker (22-55)
TRSQHTQPTPEPSTAPSTSFLLPMGPSPPAEGST

SEQ ID NO: 3354 - protein, 33 aa, synthetic construct
  REGION 1..33: note = TNR1B Linker (23-55)
RSQHTQPTPEPSTAPSTSFLLPMGPSPPAEGST

SEQ ID NO: 3355 - protein, 32 aa, synthetic construct
  REGION 1..32: note = TNR1B Linker (24-55)
SQHTQPTPEPSTAPSTSFLLPMGPSPPAEGST

SEQ ID NO: 3356 - protein, 31 aa, synthetic construct
  REGION 1..31: note = TNR1B Linker (25-55)
QHTQPTPEPSTAPSTSFLLPMGPSPPAEGST

SEQ ID NO: 3357 - protein, 30 aa, synthetic construct
  REGION 1..30: note = TNR1B Linker (26-55)
HTQPTPEPSTAPSTSFLLPMGPSPPAEGST

SEQ ID NO: 3358 - protein, 29 aa, synthetic construct
  REGION 1..29: note = TNR1B Linker (27-55)
TQPTPEPSTAPSTSFLLPMGPSPPAEGST

SEQ ID NO: 3359 - protein, 28 aa, synthetic construct
  REGION 1..28: note = TNR1B Linker (28-55)
QPTPEPSTAPSTSFLLPMGPSPPAEGST

SEQ ID NO: 3360 - protein, 27 aa, synthetic construct
  REGION 1..27: note = TNR1B Linker (29-55)
PTPEPSTAPSTSFLLPMGPSPPAEGST

SEQ ID NO: 3361 - protein, 26 aa, synthetic construct
  REGION 1..26: note = TNR1B Linker (30-55)
TPEPSTAPSTSFLLPMGPSPPAEGST

SEQ ID NO: 3362 - protein, 25 aa, synthetic construct
  REGION 1..25: note = TNR1B Linker (31-55)
PEPSTAPSTSFLLPMGPSPPAEGST

SEQ ID NO: 3363 - protein, 24 aa, synthetic construct
  REGION 1..24: note = TNR1B Linker (32-55)
EPSTAPSTSFLLPMGPSPPAEGST

SEQ ID NO: 3364 - protein, 23 aa, synthetic construct
  REGION 1..23: note = TNR1B Linker (33-55)
PSTAPSTSFLLPMGPSPPAEGST

SEQ ID NO: 3365 - protein, 22 aa, synthetic construct
  REGION 1..22: note = TNR1B Linker (34-55)
STAPSTSFLLPMGPSPPAEGST

SEQ ID NO: 3366 - protein, 21 aa, synthetic construct
  REGION 1..21: note = TNR1B Linker (35-55)
TAPSTSFLLPMGPSPPAEGST

SEQ ID NO: 3367 - protein, 20 aa, synthetic construct
  REGION 1..20: note = TNR1B Linker (36-55)
APSTSFLLPMGPSPPAEGST

SEQ ID NO: 3368 - protein, 19 aa, synthetic construct
  REGION 1..19: note = TNR1B Linker (37-55)
PSTSFLLPMGPSPPAEGST

SEQ ID NO: 3369 - protein, 18 aa, synthetic construct
  REGION 1..18: note = TNR1B Linker (38-55)
STSFLLPMGPSPPAEGST

SEQ ID NO: 3370 - protein, 17 aa, synthetic construct
  REGION 1..17: note = TNR1B Linker (39-55)
TSFLLPMGPSPPAEGST

SEQ ID NO: 3371 - protein, 16 aa, synthetic construct
  REGION 1..16: note = TNR1B Linker (40-55)
SFLLPMGPSPPAEGST

SEQ ID NO: 3372 - protein, 15 aa, synthetic construct
  REGION 1..15: note = TNR1B Linker (41-55)
FLLPMGPSPPAEGST

SEQ ID NO: 3373 - protein, 14 aa, synthetic construct
  REGION 1..14: note = TNR1B Linker (42-55)
LLPMGPSPPAEGST

SEQ ID NO: 3374 - protein, 13 aa, synthetic construct
  REGION 1..13: note = TNR1B Linker (43-55)
LPMGPSPPAEGST

SEQ ID NO: 3375 - protein, 12 aa, synthetic construct
  REGION 1..12: note = TNR1B Linker (44-55)
PMGPSPPAEGST

SEQ ID NO: 3376 - protein, 11 aa, synthetic construct
  REGION 1..11: note = TNR1B Linker (45-55)
MGPSPPAEGST

SEQ ID NO: 3377 - protein, 10 aa, synthetic construct
  REGION 1..10: note = TNR1B Linker (46-55)
GPSPPAEGST

SEQ ID NO: 3378 - protein, 9 aa, synthetic construct
  REGION 1..9: note = TNR1B Linker (47-55)
PSPPAEGST

SEQ ID NO: 3379 - protein, 8 aa, synthetic construct
  REGION 1..8: note = TNR1B Linker (48-55)
SPPAEGST

SEQ ID NO: 3380 - protein, 7 aa, synthetic construct
  REGION 1..7: note = TNR1B Linker (49-55)
PPAEGST

SEQ ID NO: 3381 - protein, 6 aa, synthetic construct
  REGION 1..6: note = TNR1B Linker (50-55)
PAEGST

SEQ ID NO: 3382 - protein, 5 aa, synthetic construct
  REGION 1..5: note = TNR1B Linker (51-55)
AEGST

SEQ ID NO: 3383 - protein, 54 aa, synthetic construct
  REGION 1..54: note = TNR1B Linker (1-54)
TSTSPTRSMAPGAVHLPQPVSTRSQHTQPTPEPSTAPSTSFLLPMGPSPPAEGS

SEQ ID NO: 3384 - protein, 53 aa, synthetic construct
  REGION 1..53: note = TNR1B Linker (2-54)
STSPTRSMAPGAVHLPQPVSTRSQHTQPTPEPSTAPSTSFLLPMGPSPPAEGS

SEQ ID NO: 3385 - protein, 52 aa, synthetic construct
  REGION 1..52: note = TNR1B Linker (3-54)
TSPTRSMAPGAVHLPQPVSTRSQHTQPTPEPSTAPSTSFLLPMGPSPPAEGS

SEQ ID NO: 3386 - protein, 51 aa, synthetic construct
  REGION 1..51: note = TNR1B Linker (4-54)
SPTRSMAPGAVHLPQPVSTRSQHTQPTPEPSTAPSTSFLLPMGPSPPAEGS

SEQ ID NO: 3387 - protein, 50 aa, synthetic construct
  REGION 1..50: note = TNR1B Linker (5-54)
PTRSMAPGAVHLPQPVSTRSQHTQPTPEPSTAPSTSFLLPMGPSPPAEGS

SEQ ID NO: 3388 - protein, 49 aa, synthetic construct
  REGION 1..49: note = TNR1B Linker (6-54)
TRSMAPGAVHLPQPVSTRSQHTQPTPEPSTAPSTSFLLPMGPSPPAEGS

SEQ ID NO: 3389 - protein, 48 aa, synthetic construct
  REGION 1..48: note = TNR1B Linker (7-54)
RSMAPGAVHLPQPVSTRSQHTQPTPEPSTAPSTSFLLPMGPSPPAEGS

SEQ ID NO: 3390 - protein, 47 aa, synthetic construct
  REGION 1..47: note = TNR1B Linker (8-54)
SMAPGAVHLPQPVSTRSQHTQPTPEPSTAPSTSFLLPMGPSPPAEGS

SEQ ID NO: 3391 - protein, 46 aa, synthetic construct
  REGION 1..46: note = TNR1B Linker (9-54)
MAPGAVHLPQPVSTRSQHTQPTPEPSTAPSTSFLLPMGPSPPAEGS

SEQ ID NO: 3392 - protein, 45 aa, synthetic construct
  REGION 1..45: note = TNR1B Linker (10-54)
APGAVHLPQPVSTRSQHTQPTPEPSTAPSTSFLLPMGPSPPAEGS

SEQ ID NO: 3393 - protein, 44 aa, synthetic construct
  REGION 1..44: note = TNR1B Linker (11-54)
PGAVHLPQPVSTRSQHTQPTPEPSTAPSTSFLLPMGPSPPAEGS

SEQ ID NO: 3394 - protein, 43 aa, synthetic construct
  REGION 1..43: note = TNR1B Linker (12-54)
GAVHLPQPVSTRSQHTQPTPEPSTAPSTSFLLPMGPSPPAEGS

SEQ ID NO: 3395 - protein, 42 aa, synthetic construct
  REGION 1..42: note = TNR1B Linker (13-54)
AVHLPQPVSTRSQHTQPTPEPSTAPSTSFLLPMGPSPPAEGS

SEQ ID NO: 3396 - protein, 41 aa, synthetic construct
  REGION 1..41: note = TNR1B Linker (14-54)
VHLPQPVSTRSQHTQPTPEPSTAPSTSFLLPMGPSPPAEGS

SEQ ID NO: 3397 - protein, 40 aa, synthetic construct
  REGION 1..40: note = TNR1B Linker (15-54)
HLPQPVSTRSQHTQPTPEPSTAPSTSFLLPMGPSPPAEGS

SEQ ID NO: 3398 - protein, 39 aa, synthetic construct
  REGION 1..39: note = TNR1B Linker (16-54)
LPQPVSTRSQHTQPTPEPSTAPSTSFLLPMGPSPPAEGS

SEQ ID NO: 3399 - protein, 38 aa, synthetic construct
  REGION 1..38: note = TNR1B Linker (17-54)
PQPVSTRSQHTQPTPEPSTAPSTSFLLPMGPSPPAEGS

SEQ ID NO: 3400 - protein, 37 aa, synthetic construct
  REGION 1..37: note = TNR1B Linker (18-54)
QPVSTRSQHTQPTPEPSTAPSTSFLLPMGPSPPAEGS

SEQ ID NO: 3401 - protein, 36 aa, synthetic construct
  REGION 1..36: note = TNR1B Linker (19-54)
PVSTRSQHTQPTPEPSTAPSTSFLLPMGPSPPAEGS

SEQ ID NO: 3402 - protein, 35 aa, synthetic construct
  REGION 1..35: note = TNR1B Linker (20-54)
VSTRSQHTQPTPEPSTAPSTSFLLPMGPSPPAEGS

SEQ ID NO: 3403 - protein, 34 aa, synthetic construct
  REGION 1..34: note = TNR1B Linker (21-54)
STRSQHTQPTPEPSTAPSTSFLLPMGPSPPAEGS

SEQ ID NO: 3404 - protein, 33 aa, synthetic construct
  REGION 1..33: note = TNR1B Linker (22-54)
TRSQHTQPTPEPSTAPSTSFLLPMGPSPPAEGS

SEQ ID NO: 3405 - protein, 32 aa, synthetic construct
  REGION 1..32: note = TNR1B Linker (23-54)
RSQHTQPTPEPSTAPSTSFLLPMGPSPPAEGS

SEQ ID NO: 3406 - protein, 31 aa, synthetic construct
  REGION 1..31: note = TNR1B Linker (24-54)
SQHTQPTPEPSTAPSTSFLLPMGPSPPAEGS

SEQ ID NO: 3407 - protein, 30 aa, synthetic construct
  REGION 1..30: note = TNR1B Linker (25-54)
QHTQPTPEPSTAPSTSFLLPMGPSPPAEGS

SEQ ID NO: 3408 - protein, 29 aa, synthetic construct
  REGION 1..29: note = TNR1B Linker (26-54)
HTQPTPEPSTAPSTSFLLPMGPSPPAEGS

SEQ ID NO: 3409 - protein, 28 aa, synthetic construct
  REGION 1..28: note = TNR1B Linker (27-54)
TQPTPEPSTAPSTSFLLPMGPSPPAEGS

SEQ ID NO: 3410 - protein, 27 aa, synthetic construct
  REGION 1..27: note = TNR1B Linker (28-54)
QPTPEPSTAPSTSFLLPMGPSPPAEGS

SEQ ID NO: 3411 - protein, 26 aa, synthetic construct
  REGION 1..26: note = TNR1B Linker (29-54)
PTPEPSTAPSTSFLLPMGPSPPAEGS

SEQ ID NO: 3412 - protein, 25 aa, synthetic construct
  REGION 1..25: note = TNR1B Linker (30-54)
TPEPSTAPSTSFLLPMGPSPPAEGS

SEQ ID NO: 3413 - protein, 24 aa, synthetic construct
  REGION 1..24: note = TNR1B Linker (31-54)
PEPSTAPSTSFLLPMGPSPPAEGS

SEQ ID NO: 3414 - protein, 23 aa, synthetic construct
  REGION 1..23: note = TNR1B Linker (32-54)
EPSTAPSTSFLLPMGPSPPAEGS

SEQ ID NO: 3415 - protein, 22 aa, synthetic construct
  REGION 1..22: note = TNR1B Linker (33-54)
PSTAPSTSFLLPMGPSPPAEGS

SEQ ID NO: 3416 - protein, 21 aa, synthetic construct
  REGION 1..21: note = TNR1B Linker (34-54)
STAPSTSFLLPMGPSPPAEGS

SEQ ID NO: 3417 - protein, 20 aa, synthetic construct
  REGION 1..20: note = TNR1B Linker (35-54)
TAPSTSFLLPMGPSPPAEGS

SEQ ID NO: 3418 - protein, 19 aa, synthetic construct
  REGION 1..19: note = TNR1B Linker (36-54)
APSTSFLLPMGPSPPAEGS

SEQ ID NO: 3419 - protein, 18 aa, synthetic construct
  REGION 1..18: note = TNR1B Linker (37-54)
PSTSFLLPMGPSPPAEGS

SEQ ID NO: 3420 - protein, 17 aa, synthetic construct
  REGION 1..17: note = TNR1B Linker (38-54)
STSFLLPMGPSPPAEGS

SEQ ID NO: 3421 - protein, 16 aa, synthetic construct
  REGION 1..16: note = TNR1B Linker (39-54)
TSFLLPMGPSPPAEGS

SEQ ID NO: 3422 - protein, 15 aa, synthetic construct
  REGION 1..15: note = TNR1B Linker (40-54)
SFLLPMGPSPPAEGS

SEQ ID NO: 3423 - protein, 14 aa, synthetic construct
  REGION 1..14: note = TNR1B Linker (41-54)
FLLPMGPSPPAEGS

SEQ ID NO: 3424 - protein, 13 aa, synthetic construct
  REGION 1..13: note = TNR1B Linker (42-54)
LLPMGPSPPAEGS

SEQ ID NO: 3425 - protein, 12 aa, synthetic construct
  REGION 1..12: note = TNR1B Linker (43-54)
LPMGPSPPAEGS

SEQ ID NO: 3426 - protein, 11 aa, synthetic construct
  REGION 1..11: note = TNR1B Linker (44-54)
PMGPSPPAEGS

SEQ ID NO: 3427 - protein, 10 aa, synthetic construct
  REGION 1..10: note = TNR1B Linker (45-54)
MGPSPPAEGS

SEQ ID NO: 3428 - protein, 9 aa, synthetic construct
  REGION 1..9: note = TNR1B Linker (46-54)
GPSPPAEGS

SEQ ID NO: 3429 - protein, 8 aa, synthetic construct
  REGION 1..8: note = TNR1B Linker (47-54)
PSPPAEGS

SEQ ID NO: 3430 - protein, 7 aa, synthetic construct
  REGION 1..7: note = TNR1B Linker (48-54)
SPPAEGS

SEQ ID NO: 3431 - protein, 6 aa, synthetic construct
  REGION 1..6: note = TNR1B Linker (49-54)
PPAEGS

SEQ ID NO: 3432 - protein, 5 aa, synthetic construct
  REGION 1..5: note = TNR1B Linker (50-54)
PAEGS

SEQ ID NO: 3433 - protein, 53 aa, synthetic construct
  REGION 1..53: note = TNR1B Linker (1-53)
TSTSPTRSMAPGAVHLPQPVSTRSQHTQPTPEPSTAPSTSFLLPMGPSPPAEG

SEQ ID NO: 3434 - protein, 52 aa, synthetic construct
  REGION 1..52: note = TNR1B Linker (2-53)
STSPTRSMAPGAVHLPQPVSTRSQHTQPTPEPSTAPSTSFLLPMGPSPPAEG

SEQ ID NO: 3435 - protein, 51 aa, synthetic construct
  REGION 1..51: note = TNR1B Linker (3-53)
TSPTRSMAPGAVHLPQPVSTRSQHTQPTPEPSTAPSTSFLLPMGPSPPAEG

SEQ ID NO: 3436 - protein, 50 aa, synthetic construct
  REGION 1..50: note = TNR1B Linker (4-53)
SPTRSMAPGAVHLPQPVSTRSQHTQPTPEPSTAPSTSFLLPMGPSPPAEG

SEQ ID NO: 3437 - protein, 49 aa, synthetic construct
  REGION 1..49: note = TNR1B Linker (5-53)
PTRSMAPGAVHLPQPVSTRSQHTQPTPEPSTAPSTSFLLPMGPSPPAEG

SEQ ID NO: 3438 - protein, 48 aa, synthetic construct
  REGION 1..48: note = TNR1B Linker (6-53)
TRSMAPGAVHLPQPVSTRSQHTQPTPEPSTAPSTSFLLPMGPSPPAEG

SEQ ID NO: 3439 - protein, 47 aa, synthetic construct
  REGION 1..47: note = TNR1B Linker (7-53)
RSMAPGAVHLPQPVSTRSQHTQPTPEPSTAPSTSFLLPMGPSPPAEG

SEQ ID NO: 3440 - protein, 46 aa, synthetic construct
  REGION 1..46: note = TNR1B Linker (8-53)
SMAPGAVHLPQPVSTRSQHTQPTPEPSTAPSTSFLLPMGPSPPAEG

SEQ ID NO: 3441 - protein, 45 aa, synthetic construct
  REGION 1..45: note = TNR1B Linker (9-53)
MAPGAVHLPQPVSTRSQHTQPTPEPSTAPSTSFLLPMGPSPPAEG

SEQ ID NO: 3442 - protein, 44 aa, synthetic construct
  REGION 1..44: note = TNR1B Linker (10-53)
APGAVHLPQPVSTRSQHTQPTPEPSTAPSTSFLLPMGPSPPAEG

SEQ ID NO: 3443 - protein, 43 aa, synthetic construct
  REGION 1..43: note = TNR1B Linker (11-53)
PGAVHLPQPVSTRSQHTQPTPEPSTAPSTSFLLPMGPSPPAEG

SEQ ID NO: 3444 - protein, 42 aa, synthetic construct
  REGION 1..42: note = TNR1B Linker (12-53)
GAVHLPQPVSTRSQHTQPTPEPSTAPSTSFLLPMGPSPPAEG

SEQ ID NO: 3445 - protein, 41 aa, synthetic construct
  REGION 1..41: note = TNR1B Linker (13-53)
AVHLPQPVSTRSQHTQPTPEPSTAPSTSFLLPMGPSPPAEG

SEQ ID NO: 3446 - protein, 40 aa, synthetic construct
  REGION 1..40: note = TNR1B Linker (14-53)
VHLPQPVSTRSQHTQPTPEPSTAPSTSFLLPMGPSPPAEG

SEQ ID NO: 3447 - protein, 39 aa, synthetic construct
  REGION 1..39: note = TNR1B Linker (15-53)
HLPQPVSTRSQHTQPTPEPSTAPSTSFLLPMGPSPPAEG

SEQ ID NO: 3448 - protein, 38 aa, synthetic construct
  REGION 1..38: note = TNR1B Linker (16-53)
LPQPVSTRSQHTQPTPEPSTAPSTSFLLPMGPSPPAEG

SEQ ID NO: 3449 - protein, 37 aa, synthetic construct
  REGION 1..37: note = TNR1B Linker (17-53)
PQPVSTRSQHTQPTPEPSTAPSTSFLLPMGPSPPAEG

SEQ ID NO: 3450 - protein, 36 aa, synthetic construct
  REGION 1..36: note = TNR1B Linker (18-53)
QPVSTRSQHTQPTPEPSTAPSTSFLLPMGPSPPAEG

SEQ ID NO: 3451 - protein, 35 aa, synthetic construct
  REGION 1..35: note = TNR1B Linker (19-53)
PVSTRSQHTQPTPEPSTAPSTSFLLPMGPSPPAEG

SEQ ID NO: 3452 - protein, 34 aa, synthetic construct
  REGION 1..34: note = TNR1B Linker (20-53)
VSTRSQHTQPTPEPSTAPSTSFLLPMGPSPPAEG

SEQ ID NO: 3453 - protein, 33 aa, synthetic construct
  REGION 1..33: note = TNR1B Linker (21-53)
STRSQHTQPTPEPSTAPSTSFLLPMGPSPPAEG

SEQ ID NO: 3454 - protein, 32 aa, synthetic construct
  REGION 1..32: note = TNR1B Linker (22-53)
TRSQHTQPTPEPSTAPSTSFLLPMGPSPPAEG

SEQ ID NO: 3455 - protein, 31 aa, synthetic construct
  REGION 1..31: note = TNR1B Linker (23-53)
RSQHTQPTPEPSTAPSTSFLLPMGPSPPAEG

SEQ ID NO: 3456 - protein, 30 aa, synthetic construct
  REGION 1..30: note = TNR1B Linker (24-53)
SQHTQPTPEPSTAPSTSFLLPMGPSPPAEG

SEQ ID NO: 3457 - protein, 29 aa, synthetic construct
  REGION 1..29: note = TNR1B Linker (25-53)
QHTQPTPEPSTAPSTSFLLPMGPSPPAEG

SEQ ID NO: 3458 - protein, 28 aa, synthetic construct
  REGION 1..28: note = TNR1B Linker (26-53)
HTQPTPEPSTAPSTSFLLPMGPSPPAEG

SEQ ID NO: 3459 - protein, 27 aa, synthetic construct
  REGION 1..27: note = TNR1B Linker (27-53)
TQPTPEPSTAPSTSFLLPMGPSPPAEG

SEQ ID NO: 3460 - protein, 26 aa, synthetic construct
  REGION 1..26: note = TNR1B Linker (28-53)
QPTPEPSTAPSTSFLLPMGPSPPAEG

SEQ ID NO: 3461 - protein, 25 aa, synthetic construct
  REGION 1..25: note = TNR1B Linker (29-53)
PTPEPSTAPSTSFLLPMGPSPPAEG

SEQ ID NO: 3462 - protein, 24 aa, synthetic construct
  REGION 1..24: note = TNR1B Linker (30-53)
TPEPSTAPSTSFLLPMGPSPPAEG

SEQ ID NO: 3463 - protein, 23 aa, synthetic construct
  REGION 1..23: note = TNR1B Linker (31-53)
PEPSTAPSTSFLLPMGPSPPAEG

SEQ ID NO: 3464 - protein, 22 aa, synthetic construct
  REGION 1..22: note = TNR1B Linker (32-53)
EPSTAPSTSFLLPMGPSPPAEG

SEQ ID NO: 3465 - protein, 21 aa, synthetic construct
  REGION 1..21: note = TNR1B Linker (33-53)
PSTAPSTSFLLPMGPSPPAEG

SEQ ID NO: 3466 - protein, 20 aa, synthetic construct
  REGION 1..20: note = TNR1B Linker (34-53)
STAPSTSFLLPMGPSPPAEG

SEQ ID NO: 3467 - protein, 19 aa, synthetic construct
  REGION 1..19: note = TNR1B Linker (35-53)
TAPSTSFLLPMGPSPPAEG

SEQ ID NO: 3468 - protein, 18 aa, synthetic construct
  REGION 1..18: note = TNR1B Linker (36-53)
APSTSFLLPMGPSPPAEG

SEQ ID NO: 3469 - protein, 17 aa, synthetic construct
  REGION 1..17: note = TNR1B Linker (37-53)
PSTSFLLPMGPSPPAEG

SEQ ID NO: 3470 - protein, 16 aa, synthetic construct
  REGION 1..16: note = TNR1B Linker (38-53)
STSFLLPMGPSPPAEG

SEQ ID NO: 3471 - protein, 15 aa, synthetic construct
  REGION 1..15: note = TNR1B Linker (39-53)
TSFLLPMGPSPPAEG

SEQ ID NO: 3472 - protein, 14 aa, synthetic construct
  REGION 1..14: note = TNR1B Linker (40-53)
SFLLPMGPSPPAEG

SEQ ID NO: 3473 - protein, 13 aa, synthetic construct
  REGION 1..13: note = TNR1B Linker (41-53)
FLLPMGPSPPAEG

SEQ ID NO: 3474 - protein, 12 aa, synthetic construct
  REGION 1..12: note = TNR1B Linker (42-53)
LLPMGPSPPAEG

SEQ ID NO: 3475 - protein, 11 aa, synthetic construct
  REGION 1..11: note = TNR1B Linker (43-53)
LPMGPSPPAEG

SEQ ID NO: 3476 - protein, 10 aa, synthetic construct
  REGION 1..10: note = TNR1B Linker (44-53)
PMGPSPPAEG

SEQ ID NO: 3477 - protein, 9 aa, synthetic construct
  REGION 1..9: note = TNR1B Linker (45-53)
MGPSPPAEG

SEQ ID NO: 3478 - protein, 8 aa, synthetic construct
  REGION 1..8: note = TNR1B Linker (46-53)
GPSPPAEG

SEQ ID NO: 3479 - protein, 7 aa, synthetic construct
  REGION 1..7: note = TNR1B Linker (47-53)
PSPPAEG

SEQ ID NO: 3480 - protein, 6 aa, synthetic construct
  REGION 1..6: note = TNR1B Linker (48-53)
SPPAEG

SEQ ID NO: 3481 - protein, 5 aa, synthetic construct
  REGION 1..5: note = TNR1B Linker (49-53)
PPAEG

SEQ ID NO: 3482 - protein, 52 aa, synthetic construct
  REGION 1..52: note = TNR1B Linker (1-52)
TSTSPTRSMAPGAVHLPQPVSTRSQHTQPTPEPSTAPSTSFLLPMGPSPPAE

SEQ ID NO: 3483 - protein, 51 aa, synthetic construct
  REGION 1..51: note = TNR1B Linker (2-52)
STSPTRSMAPGAVHLPQPVSTRSQHTQPTPEPSTAPSTSFLLPMGPSPPAE

SEQ ID NO: 3484 - protein, 50 aa, synthetic construct
  REGION 1..50: note = TNR1B Linker (3-52)
TSPTRSMAPGAVHLPQPVSTRSQHTQPTPEPSTAPSTSFLLPMGPSPPAE

SEQ ID NO: 3485 - protein, 49 aa, synthetic construct
  REGION 1..49: note = TNR1B Linker (4-52)
SPTRSMAPGAVHLPQPVSTRSQHTQPTPEPSTAPSTSFLLPMGPSPPAE

SEQ ID NO: 3486 - protein, 48 aa, synthetic construct
  REGION 1..48: note = TNR1B Linker (5-52)
PTRSMAPGAVHLPQPVSTRSQHTQPTPEPSTAPSTSFLLPMGPSPPAE

SEQ ID NO: 3487 - protein, 47 aa, synthetic construct
  REGION 1..47: note = TNR1B Linker (6-52)
TRSMAPGAVHLPQPVSTRSQHTQPTPEPSTAPSTSFLLPMGPSPPAE

SEQ ID NO: 3488 - protein, 46 aa, synthetic construct
  REGION 1..46: note = TNR1B Linker (7-52)
RSMAPGAVHLPQPVSTRSQHTQPTPEPSTAPSTSFLLPMGPSPPAE

SEQ ID NO: 3489 - protein, 45 aa, synthetic construct
  REGION 1..45: note = TNR1B Linker (8-52)
SMAPGAVHLPQPVSTRSQHTQPTPEPSTAPSTSFLLPMGPSPPAE

SEQ ID NO: 3490 - protein, 44 aa, synthetic construct
  REGION 1..44: note = TNR1B Linker (9-52)
MAPGAVHLPQPVSTRSQHTQPTPEPSTAPSTSFLLPMGPSPPAE

SEQ ID NO: 3491 - protein, 43 aa, synthetic construct
  REGION 1..43: note = TNR1B Linker (10-52)
APGAVHLPQPVSTRSQHTQPTPEPSTAPSTSFLLPMGPSPPAE

SEQ ID NO: 3492 - protein, 42 aa, synthetic construct
  REGION 1..42: note = TNR1B Linker (11-52)
PGAVHLPQPVSTRSQHTQPTPEPSTAPSTSFLLPMGPSPPAE

SEQ ID NO: 3493 - protein, 41 aa, synthetic construct
  REGION 1..41: note = TNR1B Linker (12-52)
GAVHLPQPVSTRSQHTQPTPEPSTAPSTSFLLPMGPSPPAE

SEQ ID NO: 3494 - protein, 40 aa, synthetic construct
  REGION 1..40: note = TNR1B Linker (13-52)
AVHLPQPVSTRSQHTQPTPEPSTAPSTSFLLPMGPSPPAE

SEQ ID NO: 3495 - protein, 39 aa, synthetic construct
  REGION 1..39: note = TNR1B Linker (14-52)
VHLPQPVSTRSQHTQPTPEPSTAPSTSFLLPMGPSPPAE

SEQ ID NO: 3496 - protein, 38 aa, synthetic construct
  REGION 1..38: note = TNR1B Linker (15-52)
HLPQPVSTRSQHTQPTPEPSTAPSTSFLLPMGPSPPAE

SEQ ID NO: 3497 - protein, 37 aa, synthetic construct
  REGION 1..37: note = TNR1B Linker (16-52)
LPQPVSTRSQHTQPTPEPSTAPSTSFLLPMGPSPPAE

SEQ ID NO: 3498 - protein, 36 aa, synthetic construct
  REGION 1..36: note = TNR1B Linker (17-52)
PQPVSTRSQHTQPTPEPSTAPSTSFLLPMGPSPPAE

SEQ ID NO: 3499 - protein, 35 aa, synthetic construct
  REGION 1..35: note = TNR1B Linker (18-52)
QPVSTRSQHTQPTPEPSTAPSTSFLLPMGPSPPAE

SEQ ID NO: 3500 - protein, 34 aa, synthetic construct
  REGION 1..34: note = TNR1B Linker (19-52)
PVSTRSQHTQPTPEPSTAPSTSFLLPMGPSPPAE

SEQ ID NO: 3501 - protein, 33 aa, synthetic construct
  REGION 1..33: note = TNR1B Linker (20-52)
VSTRSQHTQPTPEPSTAPSTSFLLPMGPSPPAE

SEQ ID NO: 3502 - protein, 32 aa, synthetic construct
  REGION 1..32: note = TNR1B Linker (21-52)
STRSQHTQPTPEPSTAPSTSFLLPMGPSPPAE

SEQ ID NO: 3503 - protein, 31 aa, synthetic construct
  REGION 1..31: note = TNR1B Linker (22-52)
TRSQHTQPTPEPSTAPSTSFLLPMGPSPPAE

SEQ ID NO: 3504 - protein, 30 aa, synthetic construct
  REGION 1..30: note = TNR1B Linker (23-52)
RSQHTQPTPEPSTAPSTSFLLPMGPSPPAE

SEQ ID NO: 3505 - protein, 29 aa, synthetic construct
  REGION 1..29: note = TNR1B Linker (24-52)
SQHTQPTPEPSTAPSTSFLLPMGPSPPAE

SEQ ID NO: 3506 - protein, 28 aa, synthetic construct
  REGION 1..28: note = TNR1B Linker (25-52)
QHTQPTPEPSTAPSTSFLLPMGPSPPAE

SEQ ID NO: 3507 - protein, 27 aa, synthetic construct
  REGION 1..27: note = TNR1B Linker (26-52)
HTQPTPEPSTAPSTSFLLPMGPSPPAE

SEQ ID NO: 3508 - protein, 26 aa, synthetic construct
  REGION 1..26: note = TNR1B Linker (27-52)
TQPTPEPSTAPSTSFLLPMGPSPPAE

SEQ ID NO: 3509 - protein, 25 aa, synthetic construct
  REGION 1..25: note = TNR1B Linker (28-52)
QPTPEPSTAPSTSFLLPMGPSPPAE

SEQ ID NO: 3510 - protein, 24 aa, synthetic construct
  REGION 1..24: note = TNR1B Linker (29-52)
PTPEPSTAPSTSFLLPMGPSPPAE

SEQ ID NO: 3511 - protein, 23 aa, synthetic construct
  REGION 1..23: note = TNR1B Linker (30-52)
TPEPSTAPSTSFLLPMGPSPPAE

SEQ ID NO: 3512 - protein, 22 aa, synthetic construct
  REGION 1..22: note = TNR1B Linker (31-52)
PEPSTAPSTSFLLPMGPSPPAE

SEQ ID NO: 3513 - protein, 21 aa, synthetic construct
  REGION 1..21: note = TNR1B Linker (32-52)
EPSTAPSTSFLLPMGPSPPAE

SEQ ID NO: 3514 - protein, 20 aa, synthetic construct
  REGION 1..20: note = TNR1B Linker (33-52)
PSTAPSTSFLLPMGPSPPAE

SEQ ID NO: 3515 - protein, 19 aa, synthetic construct
  REGION 1..19: note = TNR1B Linker (34-52)
STAPSTSFLLPMGPSPPAE

SEQ ID NO: 3516 - protein, 18 aa, synthetic construct
  REGION 1..18: note = TNR1B Linker (35-52)
TAPSTSFLLPMGPSPPAE

SEQ ID NO: 3517 - protein, 17 aa, synthetic construct
  REGION 1..17: note = TNR1B Linker (36-52)
APSTSFLLPMGPSPPAE

SEQ ID NO: 3518 - protein, 16 aa, synthetic construct
  REGION 1..16: note = TNR1B Linker (37-52)
PSTSFLLPMGPSPPAE

SEQ ID NO: 3519 - protein, 15 aa, synthetic construct
  REGION 1..15: note = TNR1B Linker (38-52)
STSFLLPMGPSPPAE

SEQ ID NO: 3520 - protein, 14 aa, synthetic construct
  REGION 1..14: note = TNR1B Linker (39-52)
TSFLLPMGPSPPAE

SEQ ID NO: 3521 - protein, 13 aa, synthetic construct
  REGION 1..13: note = TNR1B Linker (40-52)
SFLLPMGPSPPAE

SEQ ID NO: 3522 - protein, 12 aa, synthetic construct
  REGION 1..12: note = TNR1B Linker (41-52)
FLLPMGPSPPAE

SEQ ID NO: 3523 - protein, 11 aa, synthetic construct
  REGION 1..11: note = TNR1B Linker (42-52)
LLPMGPSPPAE

SEQ ID NO: 3524 - protein, 10 aa, synthetic construct
  REGION 1..10: note = TNR1B Linker (43-52)
LPMGPSPPAE

SEQ ID NO: 3525 - protein, 9 aa, synthetic construct
  REGION 1..9: note = TNR1B Linker (44-52)
PMGPSPPAE

SEQ ID NO: 3526 - protein, 8 aa, synthetic construct
  REGION 1..8: note = TNR1B Linker (45-52)
MGPSPPAE

SEQ ID NO: 3527 - protein, 7 aa, synthetic construct
  REGION 1..7: note = TNR1B Linker (46-52)
GPSPPAE

SEQ ID NO: 3528 - protein, 6 aa, synthetic construct
  REGION 1..6: note = TNR1B Linker (47-52)
PSPPAE

SEQ ID NO: 3529 - protein, 5 aa, synthetic construct
  REGION 1..5: note = TNR1B Linker (48-52)
SPPAE

SEQ ID NO: 3530 - protein, 51 aa, synthetic construct
  REGION 1..51: note = TNR1B Linker (1-51)
TSTSPTRSMAPGAVHLPQPVSTRSQHTQPTPEPSTAPSTSFLLPMGPSPPA

SEQ ID NO: 3531 - protein, 50 aa, synthetic construct
  REGION 1..50: note = TNR1B Linker (2-51)
STSPTRSMAPGAVHLPQPVSTRSQHTQPTPEPSTAPSTSFLLPMGPSPPA

SEQ ID NO: 3532 - protein, 49 aa, synthetic construct
  REGION 1..49: note = TNR1B Linker (3-51)
TSPTRSMAPGAVHLPQPVSTRSQHTQPTPEPSTAPSTSFLLPMGPSPPA

SEQ ID NO: 3533 - protein, 48 aa, synthetic construct
  REGION 1..48: note = TNR1B Linker (4-51)
SPTRSMAPGAVHLPQPVSTRSQHTQPTPEPSTAPSTSFLLPMGPSPPA

SEQ ID NO: 3534 - protein, 47 aa, synthetic construct
  REGION 1..47: note = TNR1B Linker (5-51)
PTRSMAPGAVHLPQPVSTRSQHTQPTPEPSTAPSTSFLLPMGPSPPA

SEQ ID NO: 3535 - protein, 46 aa, synthetic construct
  REGION 1..46: note = TNR1B Linker (6-51)
TRSMAPGAVHLPQPVSTRSQHTQPTPEPSTAPSTSFLLPMGPSPPA

SEQ ID NO: 3536 - protein, 45 aa, synthetic construct
  REGION 1..45: note = TNR1B Linker (7-51)
RSMAPGAVHLPQPVSTRSQHTQPTPEPSTAPSTSFLLPMGPSPPA

SEQ ID NO: 3537 - protein, 44 aa, synthetic construct
  REGION 1..44: note = TNR1B Linker (8-51)
SMAPGAVHLPQPVSTRSQHTQPTPEPSTAPSTSFLLPMGPSPPA

SEQ ID NO: 3538 - protein, 43 aa, synthetic construct
  REGION 1..43: note = TNR1B Linker (9-51)
MAPGAVHLPQPVSTRSQHTQPTPEPSTAPSTSFLLPMGPSPPA

SEQ ID NO: 3539 - protein, 42 aa, synthetic construct
  REGION 1..42: note = TNR1B Linker (10-51)
APGAVHLPQPVSTRSQHTQPTPEPSTAPSTSFLLPMGPSPPA

SEQ ID NO: 3540 - protein, 41 aa, synthetic construct
  REGION 1..41: note = TNR1B Linker (11-51)
PGAVHLPQPVSTRSQHTQPTPEPSTAPSTSFLLPMGPSPPA

SEQ ID NO: 3541 - protein, 40 aa, synthetic construct
  REGION 1..40: note = TNR1B Linker (12-51)
GAVHLPQPVSTRSQHTQPTPEPSTAPSTSFLLPMGPSPPA

SEQ ID NO: 3542 - protein, 39 aa, synthetic construct
  REGION 1..39: note = TNR1B Linker (13-51)
AVHLPQPVSTRSQHTQPTPEPSTAPSTSFLLPMGPSPPA

SEQ ID NO: 3543 - protein, 38 aa, synthetic construct
  REGION 1..38: note = TNR1B Linker (14-51)
VHLPQPVSTRSQHTQPTPEPSTAPSTSFLLPMGPSPPA

SEQ ID NO: 3544 - protein, 37 aa, synthetic construct
  REGION 1..37: note = TNR1B Linker (15-51)
HLPQPVSTRSQHTQPTPEPSTAPSTSFLLPMGPSPPA

SEQ ID NO: 3545 - protein, 36 aa, synthetic construct
  REGION 1..36: note = TNR1B Linker (16-51)
LPQPVSTRSQHTQPTPEPSTAPSTSFLLPMGPSPPA

SEQ ID NO: 3546 - protein, 35 aa, synthetic construct
  REGION 1..35: note = TNR1B Linker (17-51)
PQPVSTRSQHTQPTPEPSTAPSTSFLLPMGPSPPA

SEQ ID NO: 3547 - protein, 34 aa, synthetic construct
  REGION 1..34: note = TNR1B Linker (18-51)
QPVSTRSQHTQPTPEPSTAPSTSFLLPMGPSPPA

SEQ ID NO: 3548 - protein, 33 aa, synthetic construct
  REGION 1..33: note = TNR1B Linker (19-51)
PVSTRSQHTQPTPEPSTAPSTSFLLPMGPSPPA

SEQ ID NO: 3549 - protein, 32 aa, synthetic construct
  REGION 1..32: note = TNR1B Linker (20-51)
VSTRSQHTQPTPEPSTAPSTSFLLPMGPSPPA

SEQ ID NO: 3550 - protein, 31 aa, synthetic construct
  REGION 1..31: note = TNR1B Linker (21-51)
STRSQHTQPTPEPSTAPSTSFLLPMGPSPPA

SEQ ID NO: 3551 - protein, 30 aa, synthetic construct
  REGION 1..30: note = TNR1B Linker (22-51)
TRSQHTQPTPEPSTAPSTSFLLPMGPSPPA

SEQ ID NO: 3552 - protein, 29 aa, synthetic construct
  REGION 1..29: note = TNR1B Linker (23-51)
RSQHTQPTPEPSTAPSTSFLLPMGPSPPA

SEQ ID NO: 3553 - protein, 28 aa, synthetic construct
  REGION 1..28: note = TNR1B Linker (24-51)
SQHTQPTPEPSTAPSTSFLLPMGPSPPA

SEQ ID NO: 3554 - protein, 27 aa, synthetic construct
  REGION 1..27: note = TNR1B Linker (25-51)
QHTQPTPEPSTAPSTSFLLPMGPSPPA

SEQ ID NO: 3555 - protein, 26 aa, synthetic construct
  REGION 1..26: note = TNR1B Linker (26-51)
HTQPTPEPSTAPSTSFLLPMGPSPPA

SEQ ID NO: 3556 - protein, 25 aa, synthetic construct
  REGION 1..25: note = TNR1B Linker (27-51)
TQPTPEPSTAPSTSFLLPMGPSPPA

SEQ ID NO: 3557 - protein, 24 aa, synthetic construct
  REGION 1..24: note = TNR1B Linker (28-51)
QPTPEPSTAPSTSFLLPMGPSPPA

SEQ ID NO: 3558 - protein, 23 aa, synthetic construct
  REGION 1..23: note = TNR1B Linker (29-51)
PTPEPSTAPSTSFLLPMGPSPPA

SEQ ID NO: 3559 - protein, 22 aa, synthetic construct
  REGION 1..22: note = TNR1B Linker (30-51)
TPEPSTAPSTSFLLPMGPSPPA

SEQ ID NO: 3560 - protein, 21 aa, synthetic construct
  REGION 1..21: note = TNR1B Linker (31-51)
PEPSTAPSTSFLLPMGPSPPA

SEQ ID NO: 3561 - protein, 20 aa, synthetic construct
  REGION 1..20: note = TNR1B Linker (32-51)
EPSTAPSTSFLLPMGPSPPA

SEQ ID NO: 3562 - protein, 19 aa, synthetic construct
  REGION 1..19: note = TNR1B Linker (33-51)
PSTAPSTSFLLPMGPSPPA

SEQ ID NO: 3563 - protein, 18 aa, synthetic construct
  REGION 1..18: note = TNR1B Linker (34-51)
STAPSTSFLLPMGPSPPA

SEQ ID NO: 3564 - protein, 17 aa, synthetic construct
  REGION 1..17: note = TNR1B Linker (35-51)
TAPSTSFLLPMGPSPPA

SEQ ID NO: 3565 - protein, 16 aa, synthetic construct
  REGION 1..16: note = TNR1B Linker (36-51)
APSTSFLLPMGPSPPA

SEQ ID NO: 3566 - protein, 15 aa, synthetic construct
  REGION 1..15: note = TNR1B Linker (37-51)
PSTSFLLPMGPSPPA

SEQ ID NO: 3567 - protein, 14 aa, synthetic construct
  REGION 1..14: note = TNR1B Linker (38-51)
STSFLLPMGPSPPA

SEQ ID NO: 3568 - protein, 13 aa, synthetic construct
  REGION 1..13: note = TNR1B Linker (39-51)
TSFLLPMGPSPPA

SEQ ID NO: 3569 - protein, 12 aa, synthetic construct
  REGION 1..12: note = TNR1B Linker (40-51)
SFLLPMGPSPPA

SEQ ID NO: 3570 - protein, 11 aa, synthetic construct
  REGION 1..11: note = TNR1B Linker (41-51)
FLLPMGPSPPA

SEQ ID NO: 3571 - protein, 10 aa, synthetic construct
  REGION 1..10: note = TNR1B Linker (42-51)
LLPMGPSPPA

SEQ ID NO: 3572 - protein, 9 aa, synthetic construct
  REGION 1..9: note = TNR1B Linker (43-51)
LPMGPSPPA

SEQ ID NO: 3573 - protein, 8 aa, synthetic construct
  REGION 1..8: note = TNR1B Linker (44-51)
PMGPSPPA

SEQ ID NO: 3574 - protein, 7 aa, synthetic construct
  REGION 1..7: note = TNR1B Linker (45-51)
MGPSPPA

SEQ ID NO: 3575 - protein, 6 aa, synthetic construct
  REGION 1..6: note = TNR1B Linker (46-51)
GPSPPA

SEQ ID NO: 3576 - protein, 5 aa, synthetic construct
  REGION 1..5: note = TNR1B Linker (47-51)
PSPPA

SEQ ID NO: 3577 - protein, 50 aa, synthetic construct
  REGION 1..50: note = TNR1B Linker (1-50)
TSTSPTRSMAPGAVHLPQPVSTRSQHTQPTPEPSTAPSTSFLLPMGPSPP

SEQ ID NO: 3578 - protein, 49 aa, synthetic construct
  REGION 1..49: note = TNR1B Linker (2-50)
STSPTRSMAPGAVHLPQPVSTRSQHTQPTPEPSTAPSTSFLLPMGPSPP

SEQ ID NO: 3579 - protein, 48 aa, synthetic construct
  REGION 1..48: note = TNR1B Linker (3-50)
TSPTRSMAPGAVHLPQPVSTRSQHTQPTPEPSTAPSTSFLLPMGPSPP

SEQ ID NO: 3580 - protein, 47 aa, synthetic construct
  REGION 1..47: note = TNR1B Linker (4-50)
SPTRSMAPGAVHLPQPVSTRSQHTQPTPEPSTAPSTSFLLPMGPSPP

SEQ ID NO: 3581 - protein, 46 aa, synthetic construct
  REGION 1..46: note = TNR1B Linker (5-50)
PTRSMAPGAVHLPQPVSTRSQHTQPTPEPSTAPSTSFLLPMGPSPP

SEQ ID NO: 3582 - protein, 45 aa, synthetic construct
  REGION 1..45: note = TNR1B Linker (6-50)
TRSMAPGAVHLPQPVSTRSQHTQPTPEPSTAPSTSFLLPMGPSPP

SEQ ID NO: 3583 - protein, 44 aa, synthetic construct
  REGION 1..44: note = TNR1B Linker (7-50)
RSMAPGAVHLPQPVSTRSQHTQPTPEPSTAPSTSFLLPMGPSPP

SEQ ID NO: 3584 - protein, 43 aa, synthetic construct
  REGION 1..43: note = TNR1B Linker (8-50)
SMAPGAVHLPQPVSTRSQHTQPTPEPSTAPSTSFLLPMGPSPP

SEQ ID NO: 3585 - protein, 42 aa, synthetic construct
  REGION 1..42: note = TNR1B Linker (9-50)
MAPGAVHLPQPVSTRSQHTQPTPEPSTAPSTSFLLPMGPSPP

SEQ ID NO: 3586 - protein, 41 aa, synthetic construct
  REGION 1..41: note = TNR1B Linker (10-50)
APGAVHLPQPVSTRSQHTQPTPEPSTAPSTSFLLPMGPSPP

SEQ ID NO: 3587 - protein, 40 aa, synthetic construct
  REGION 1..40: note = TNR1B Linker (11-50)
PGAVHLPQPVSTRSQHTQPTPEPSTAPSTSFLLPMGPSPP

SEQ ID NO: 3588 - protein, 39 aa, synthetic construct
  REGION 1..39: note = TNR1B Linker (12-50)
GAVHLPQPVSTRSQHTQPTPEPSTAPSTSFLLPMGPSPP

SEQ ID NO: 3589 - protein, 38 aa, synthetic construct
  REGION 1..38: note = TNR1B Linker (13-50)
AVHLPQPVSTRSQHTQPTPEPSTAPSTSFLLPMGPSPP

SEQ ID NO: 3590 - protein, 37 aa, synthetic construct
  REGION 1..37: note = TNR1B Linker (14-50)
VHLPQPVSTRSQHTQPTPEPSTAPSTSFLLPMGPSPP

SEQ ID NO: 3591 - protein, 36 aa, synthetic construct
  REGION 1..36: note = TNR1B Linker (15-50)
HLPQPVSTRSQHTQPTPEPSTAPSTSFLLPMGPSPP

SEQ ID NO: 3592 - protein, 35 aa, synthetic construct
  REGION 1..35: note = TNR1B Linker (16-50)
LPQPVSTRSQHTQPTPEPSTAPSTSFLLPMGPSPP

SEQ ID NO: 3593 - protein, 34 aa, synthetic construct
  REGION 1..34: note = TNR1B Linker (17-50)
PQPVSTRSQHTQPTPEPSTAPSTSFLLPMGPSPP

SEQ ID NO: 3594 - protein, 33 aa, synthetic construct
  REGION 1..33: note = TNR1B Linker (18-50)
QPVSTRSQHTQPTPEPSTAPSTSFLLPMGPSPP

SEQ ID NO: 3595 - protein, 32 aa, synthetic construct
  REGION 1..32: note = TNR1B Linker (19-50)
PVSTRSQHTQPTPEPSTAPSTSFLLPMGPSPP

SEQ ID NO: 3596 - protein, 31 aa, synthetic construct
  REGION 1..31: note = TNR1B Linker (20-50)
VSTRSQHTQPTPEPSTAPSTSFLLPMGPSPP

SEQ ID NO: 3597 - protein, 30 aa, synthetic construct
  REGION 1..30: note = TNR1B Linker (21-50)
STRSQHTQPTPEPSTAPSTSFLLPMGPSPP

SEQ ID NO: 3598 - protein, 29 aa, synthetic construct
  REGION 1..29: note = TNR1B Linker (22-50)
TRSQHTQPTPEPSTAPSTSFLLPMGPSPP

SEQ ID NO: 3599 - protein, 28 aa, synthetic construct
  REGION 1..28: note = TNR1B Linker (23-50)
RSQHTQPTPEPSTAPSTSFLLPMGPSPP

SEQ ID NO: 3600 - protein, 27 aa, synthetic construct
  REGION 1..27: note = TNR1B Linker (24-50)
SQHTQPTPEPSTAPSTSFLLPMGPSPP

SEQ ID NO: 3601 - protein, 26 aa, synthetic construct
  REGION 1..26: note = TNR1B Linker (25-50)
QHTQPTPEPSTAPSTSFLLPMGPSPP

SEQ ID NO: 3602 - protein, 25 aa, synthetic construct
  REGION 1..25: note = TNR1B Linker (26-50)
HTQPTPEPSTAPSTSFLLPMGPSPP

SEQ ID NO: 3603 - protein, 24 aa, synthetic construct
  REGION 1..24: note = TNR1B Linker (27-50)
TQPTPEPSTAPSTSFLLPMGPSPP

SEQ ID NO: 3604 - protein, 23 aa, synthetic construct
  REGION 1..23: note = TNR1B Linker (28-50)
QPTPEPSTAPSTSFLLPMGPSPP

SEQ ID NO: 3605 - protein, 22 aa, synthetic construct
  REGION 1..22: note = TNR1B Linker (29-50)
PTPEPSTAPSTSFLLPMGPSPP

SEQ ID NO: 3606 - protein, 21 aa, synthetic construct
  REGION 1..21: note = TNR1B Linker (30-50)
TPEPSTAPSTSFLLPMGPSPP

SEQ ID NO: 3607 - protein, 20 aa, synthetic construct
  REGION 1..20: note = TNR1B Linker (31-50)
PEPSTAPSTSFLLPMGPSPP

SEQ ID NO: 3608 - protein, 19 aa, synthetic construct
  REGION 1..19: note = TNR1B Linker (32-50)
EPSTAPSTSFLLPMGPSPP

SEQ ID NO: 3609 - protein, 18 aa, synthetic construct
  REGION 1..18: note = TNR1B Linker (33-50)
PSTAPSTSFLLPMGPSPP

SEQ ID NO: 3610 - protein, 17 aa, synthetic construct
  REGION 1..17: note = TNR1B Linker (34-50)
STAPSTSFLLPMGPSPP

SEQ ID NO: 3611 - protein, 16 aa, synthetic construct
  REGION 1..16: note = TNR1B Linker (35-50)
TAPSTSFLLPMGPSPP

SEQ ID NO: 3612 - protein, 15 aa, synthetic construct
  REGION 1..15: note = TNR1B Linker (36-50)
APSTSFLLPMGPSPP

SEQ ID NO: 3613 - protein, 14 aa, synthetic construct
  REGION 1..14: note = TNR1B Linker (37-50)
PSTSFLLPMGPSPP

SEQ ID NO: 3614 - protein, 13 aa, synthetic construct
  REGION 1..13: note = TNR1B Linker (38-50)
STSFLLPMGPSPP

SEQ ID NO: 3615 - protein, 12 aa, synthetic construct
  REGION 1..12: note = TNR1B Linker (39-50)
TSFLLPMGPSPP

SEQ ID NO: 3616 - protein, 11 aa, synthetic construct
  REGION 1..11: note = TNR1B Linker (40-50)
SFLLPMGPSPP

SEQ ID NO: 3617 - protein, 10 aa, synthetic construct
  REGION 1..10: note = TNR1B Linker (41-50)
FLLPMGPSPP

SEQ ID NO: 3618 - protein, 9 aa, synthetic construct
  REGION 1..9: note = TNR1B Linker (42-50)
LLPMGPSPP

SEQ ID NO: 3619 - protein, 8 aa, synthetic construct
  REGION 1..8: note = TNR1B Linker (43-50)
LPMGPSPP

SEQ ID NO: 3620 - protein, 7 aa, synthetic construct
  REGION 1..7: note = TNR1B Linker (44-50)
PMGPSPP

SEQ ID NO: 3621 - protein, 6 aa, synthetic construct
  REGION 1..6: note = TNR1B Linker (45-50)
MGPSPP

SEQ ID NO: 3622 - protein, 5 aa, synthetic construct
  REGION 1..5: note = TNR1B Linker (46-50)
GPSPP

SEQ ID NO: 3623 - protein, 49 aa, synthetic construct
  REGION 1..49: note = TNR1B Linker (1-49)
TSTSPTRSMAPGAVHLPQPVSTRSQHTQPTPEPSTAPSTSFLLPMGPSP

SEQ ID NO: 3624 - protein, 48 aa, synthetic construct
  REGION 1..48: note = TNR1B Linker (2-49)
STSPTRSMAPGAVHLPQPVSTRSQHTQPTPEPSTAPSTSFLLPMGPSP

SEQ ID NO: 3625 - protein, 47 aa, synthetic construct
  REGION 1..47: note = TNR1B Linker (3-49)
TSPTRSMAPGAVHLPQPVSTRSQHTQPTPEPSTAPSTSFLLPMGPSP

SEQ ID NO: 3626 - protein, 46 aa, synthetic construct
  REGION 1..46: note = TNR1B Linker (4-49)
SPTRSMAPGAVHLPQPVSTRSQHTQPTPEPSTAPSTSFLLPMGPSP

SEQ ID NO: 3627 - protein, 45 aa, synthetic construct
  REGION 1..45: note = TNR1B Linker (5-49)
PTRSMAPGAVHLPQPVSTRSQHTQPTPEPSTAPSTSFLLPMGPSP

SEQ ID NO: 3628 - protein, 44 aa, synthetic construct
  REGION 1..44: note = TNR1B Linker (6-49)
TRSMAPGAVHLPQPVSTRSQHTQPTPEPSTAPSTSFLLPMGPSP

SEQ ID NO: 3629 - protein, 43 aa, synthetic construct
  REGION 1..43: note = TNR1B Linker (7-49)
RSMAPGAVHLPQPVSTRSQHTQPTPEPSTAPSTSFLLPMGPSP

SEQ ID NO: 3630 - protein, 42 aa, synthetic construct
  REGION 1..42: note = TNR1B Linker (8-49)
SMAPGAVHLPQPVSTRSQHTQPTPEPSTAPSTSFLLPMGPSP

SEQ ID NO: 3631 - protein, 41 aa, synthetic construct
  REGION 1..41: note = TNR1B Linker (9-49)
MAPGAVHLPQPVSTRSQHTQPTPEPSTAPSTSFLLPMGPSP

SEQ ID NO: 3632 - protein, 40 aa, synthetic construct
  REGION 1..40: note = TNR1B Linker (10-49)
APGAVHLPQPVSTRSQHTQPTPEPSTAPSTSFLLPMGPSP

SEQ ID NO: 3633 - protein, 39 aa, synthetic construct
  REGION 1..39: note = TNR1B Linker (11-49)
PGAVHLPQPVSTRSQHTQPTPEPSTAPSTSFLLPMGPSP

SEQ ID NO: 3634 - protein, 38 aa, synthetic construct
  REGION 1..38: note = TNR1B Linker (12-49)
GAVHLPQPVSTRSQHTQPTPEPSTAPSTSFLLPMGPSP

SEQ ID NO: 3635 - protein, 37 aa, synthetic construct
  REGION 1..37: note = TNR1B Linker (13-49)
AVHLPQPVSTRSQHTQPTPEPSTAPSTSFLLPMGPSP

SEQ ID NO: 3636 - protein, 36 aa, synthetic construct
  REGION 1..36: note = TNR1B Linker (14-49)
VHLPQPVSTRSQHTQPTPEPSTAPSTSFLLPMGPSP

SEQ ID NO: 3637 - protein, 35 aa, synthetic construct
  REGION 1..35: note = TNR1B Linker (15-49)
HLPQPVSTRSQHTQPTPEPSTAPSTSFLLPMGPSP

SEQ ID NO: 3638 - protein, 34 aa, synthetic construct
  REGION 1..34: note = TNR1B Linker (16-49)
LPQPVSTRSQHTQPTPEPSTAPSTSFLLPMGPSP

SEQ ID NO: 3639 - protein, 33 aa, synthetic construct
  REGION 1..33: note = TNR1B Linker (17-49)
PQPVSTRSQHTQPTPEPSTAPSTSFLLPMGPSP

SEQ ID NO: 3640 - protein, 32 aa, synthetic construct
  REGION 1..32: note = TNR1B Linker (18-49)
QPVSTRSQHTQPTPEPSTAPSTSFLLPMGPSP

SEQ ID NO: 3641 - protein, 31 aa, synthetic construct
  REGION 1..31: note = TNR1B Linker (19-49)
PVSTRSQHTQPTPEPSTAPSTSFLLPMGPSP

SEQ ID NO: 3642 - protein, 30 aa, synthetic construct
  REGION 1..30: note = TNR1B Linker (20-49)
VSTRSQHTQPTPEPSTAPSTSFLLPMGPSP

SEQ ID NO: 3643 - protein, 29 aa, synthetic construct
  REGION 1..29: note = TNR1B Linker (21-49)
STRSQHTQPTPEPSTAPSTSFLLPMGPSP

SEQ ID NO: 3644 - protein, 28 aa, synthetic construct
  REGION 1..28: note = TNR1B Linker (22-49)
TRSQHTQPTPEPSTAPSTSFLLPMGPSP

SEQ ID NO: 3645 - protein, 27 aa, synthetic construct
  REGION 1..27: note = TNR1B Linker (23-49)
RSQHTQPTPEPSTAPSTSFLLPMGPSP

SEQ ID NO: 3646 - protein, 26 aa, synthetic construct
  REGION 1..26: note = TNR1B Linker (24-49)
SQHTQPTPEPSTAPSTSFLLPMGPSP

SEQ ID NO: 3647 - protein, 25 aa, synthetic construct
  REGION 1..25: note = TNR1B Linker (25-49)
QHTQPTPEPSTAPSTSFLLPMGPSP

SEQ ID NO: 3648 - protein, 24 aa, synthetic construct
  REGION 1..24: note = TNR1B Linker (26-49)
HTQPTPEPSTAPSTSFLLPMGPSP

SEQ ID NO: 3649 - protein, 23 aa, synthetic construct
  REGION 1..23: note = TNR1B Linker (27-49)
TQPTPEPSTAPSTSFLLPMGPSP

SEQ ID NO: 3650 - protein, 22 aa, synthetic construct
  REGION 1..22: note = TNR1B Linker (28-49)
QPTPEPSTAPSTSFLLPMGPSP

SEQ ID NO: 3651 - protein, 21 aa, synthetic construct
  REGION 1..21: note = TNR1B Linker (29-49)
PTPEPSTAPSTSFLLPMGPSP

SEQ ID NO: 3652 - protein, 20 aa, synthetic construct
  REGION 1..20: note = TNR1B Linker (30-49)
TPEPSTAPSTSFLLPMGPSP

SEQ ID NO: 3653 - protein, 19 aa, synthetic construct
  REGION 1..19: note = TNR1B Linker (31-49)
PEPSTAPSTSFLLPMGPSP

SEQ ID NO: 3654 - protein, 18 aa, synthetic construct
  REGION 1..18: note = TNR1B Linker (32-49)
EPSTAPSTSFLLPMGPSP

SEQ ID NO: 3655 - protein, 17 aa, synthetic construct
  REGION 1..17: note = TNR1B Linker (33-49)
PSTAPSTSFLLPMGPSP

SEQ ID NO: 3656 - protein, 16 aa, synthetic construct
  REGION 1..16: note = TNR1B Linker (34-49)
STAPSTSFLLPMGPSP

SEQ ID NO: 3657 - protein, 15 aa, synthetic construct
  REGION 1..15: note = TNR1B Linker (35-49)
TAPSTSFLLPMGPSP

SEQ ID NO: 3658 - protein, 14 aa, synthetic construct
  REGION 1..14: note = TNR1B Linker (36-49)
APSTSFLLPMGPSP

SEQ ID NO: 3659 - protein, 13 aa, synthetic construct
  REGION 1..13: note = TNR1B Linker (37-49)
PSTSFLLPMGPSP

SEQ ID NO: 3660 - protein, 12 aa, synthetic construct
  REGION 1..12: note = TNR1B Linker (38-49)
STSFLLPMGPSP

SEQ ID NO: 3661 - protein, 11 aa, synthetic construct
  REGION 1..11: note = TNR1B Linker (39-49)
TSFLLPMGPSP

SEQ ID NO: 3662 - protein, 10 aa, synthetic construct
  REGION 1..10: note = TNR1B Linker (40-49)
SFLLPMGPSP

SEQ ID NO: 3663 - protein, 9 aa, synthetic construct
  REGION 1..9: note = TNR1B Linker (41-49)
FLLPMGPSP

SEQ ID NO: 3664 - protein, 8 aa, synthetic construct
  REGION 1..8: note = TNR1B Linker (42-49)
LLPMGPSP

SEQ ID NO: 3665 - protein, 7 aa, synthetic construct
  REGION 1..7: note = TNR1B Linker (43-49)
LPMGPSP

SEQ ID NO: 3666 - protein, 6 aa, synthetic construct
  REGION 1..6: note = TNR1B Linker (44-49)
PMGPSP

SEQ ID NO: 3667 - protein, 5 aa, synthetic construct
  REGION 1..5: note = TNR1B Linker (45-49)
MGPSP

SEQ ID NO: 3668 - protein, 48 aa, synthetic construct
  REGION 1..48: note = TNR1B Linker (1-48)
TSTSPTRSMAPGAVHLPQPVSTRSQHTQPTPEPSTAPSTSFLLPMGPS

SEQ ID NO: 3669 - protein, 47 aa, synthetic construct
  REGION 1..47: note = TNR1B Linker (2-48)
STSPTRSMAPGAVHLPQPVSTRSQHTQPTPEPSTAPSTSFLLPMGPS

SEQ ID NO: 3670 - protein, 46 aa, synthetic construct
  REGION 1..46: note = TNR1B Linker (3-48)
TSPTRSMAPGAVHLPQPVSTRSQHTQPTPEPSTAPSTSFLLPMGPS

SEQ ID NO: 3671 - protein, 45 aa, synthetic construct
  REGION 1..45: note = TNR1B Linker (4-48)
SPTRSMAPGAVHLPQPVSTRSQHTQPTPEPSTAPSTSFLLPMGPS

SEQ ID NO: 3672 - protein, 44 aa, synthetic construct
  REGION 1..44: note = TNR1B Linker (5-48)
PTRSMAPGAVHLPQPVSTRSQHTQPTPEPSTAPSTSFLLPMGPS

SEQ ID NO: 3673 - protein, 43 aa, synthetic construct
  REGION 1..43: note = TNR1B Linker (6-48)
TRSMAPGAVHLPQPVSTRSQHTQPTPEPSTAPSTSFLLPMGPS

SEQ ID NO: 3674 - protein, 42 aa, synthetic construct
  REGION 1..42: note = TNR1B Linker (7-48)
RSMAPGAVHLPQPVSTRSQHTQPTPEPSTAPSTSFLLPMGPS

SEQ ID NO: 3675 - protein, 41 aa, synthetic construct
  REGION 1..41: note = TNR1B Linker (8-48)
SMAPGAVHLPQPVSTRSQHTQPTPEPSTAPSTSFLLPMGPS

SEQ ID NO: 3676 - protein, 40 aa, synthetic construct
  REGION 1..40: note = TNR1B Linker (9-48)
MAPGAVHLPQPVSTRSQHTQPTPEPSTAPSTSFLLPMGPS

SEQ ID NO: 3677 - protein, 39 aa, synthetic construct
  REGION 1..39: note = TNR1B Linker (10-48)
APGAVHLPQPVSTRSQHTQPTPEPSTAPSTSFLLPMGPS

SEQ ID NO: 3678 - protein, 38 aa, synthetic construct
  REGION 1..38: note = TNR1B Linker (11-48)
PGAVHLPQPVSTRSQHTQPTPEPSTAPSTSFLLPMGPS

SEQ ID NO: 3679 - protein, 37 aa, synthetic construct
  REGION 1..37: note = TNR1B Linker (12-48)
GAVHLPQPVSTRSQHTQPTPEPSTAPSTSFLLPMGPS

SEQ ID NO: 3680 - protein, 36 aa, synthetic construct
  REGION 1..36: note = TNR1B Linker (13-48)
AVHLPQPVSTRSQHTQPTPEPSTAPSTSFLLPMGPS

SEQ ID NO: 3681 - protein, 35 aa, synthetic construct
  REGION 1..35: note = TNR1B Linker (14-48)
VHLPQPVSTRSQHTQPTPEPSTAPSTSFLLPMGPS

SEQ ID NO: 3682 - protein, 34 aa, synthetic construct
  REGION 1..34: note = TNR1B Linker (15-48)
HLPQPVSTRSQHTQPTPEPSTAPSTSFLLPMGPS

SEQ ID NO: 3683 - protein, 33 aa, synthetic construct
  REGION 1..33: note = TNR1B Linker (16-48)
LPQPVSTRSQHTQPTPEPSTAPSTSFLLPMGPS

SEQ ID NO: 3684 - protein, 32 aa, synthetic construct
  REGION 1..32: note = TNR1B Linker (17-48)
PQPVSTRSQHTQPTPEPSTAPSTSFLLPMGPS

SEQ ID NO: 3685 - protein, 31 aa, synthetic construct
  REGION 1..31: note = TNR1B Linker (18-48)
QPVSTRSQHTQPTPEPSTAPSTSFLLPMGPS

SEQ ID NO: 3686 - protein, 30 aa, synthetic construct
  REGION 1..30: note = TNR1B Linker (19-48)
PVSTRSQHTQPTPEPSTAPSTSFLLPMGPS

SEQ ID NO: 3687 - protein, 29 aa, synthetic construct
  REGION 1..29: note = TNR1B Linker (20-48)
VSTRSQHTQPTPEPSTAPSTSFLLPMGPS

SEQ ID NO: 3688 - protein, 28 aa, synthetic construct
  REGION 1..28: note = TNR1B Linker (21-48)
STRSQHTQPTPEPSTAPSTSFLLPMGPS

SEQ ID NO: 3689 - protein, 27 aa, synthetic construct
  REGION 1..27: note = TNR1B Linker (22-48)
TRSQHTQPTPEPSTAPSTSFLLPMGPS

SEQ ID NO: 3690 - protein, 26 aa, synthetic construct
  REGION 1..26: note = TNR1B Linker (23-48)
RSQHTQPTPEPSTAPSTSFLLPMGPS

SEQ ID NO: 3691 - protein, 25 aa, synthetic construct
  REGION 1..25: note = TNR1B Linker (24-48)
SQHTQPTPEPSTAPSTSFLLPMGPS

SEQ ID NO: 3692 - protein, 24 aa, synthetic construct
  REGION 1..24: note = TNR1B Linker (25-48)
QHTQPTPEPSTAPSTSFLLPMGPS

SEQ ID NO: 3693 - protein, 23 aa, synthetic construct
  REGION 1..23: note = TNR1B Linker (26-48)
HTQPTPEPSTAPSTSFLLPMGPS

SEQ ID NO: 3694 - protein, 22 aa, synthetic construct
  REGION 1..22: note = TNR1B Linker (27-48)
TQPTPEPSTAPSTSFLLPMGPS

SEQ ID NO: 3695 - protein, 21 aa, synthetic construct
  REGION 1..21: note = TNR1B Linker (28-48)
QPTPEPSTAPSTSFLLPMGPS

SEQ ID NO: 3696 - protein, 20 aa, synthetic construct
  REGION 1..20: note = TNR1B Linker (29-48)
PTPEPSTAPSTSFLLPMGPS

SEQ ID NO: 3697 - protein, 19 aa, synthetic construct
  REGION 1..19: note = TNR1B Linker (30-48)
TPEPSTAPSTSFLLPMGPS

SEQ ID NO: 3698 - protein, 18 aa, synthetic construct
  REGION 1..18: note = TNR1B Linker (31-48)
PEPSTAPSTSFLLPMGPS

SEQ ID NO: 3699 - protein, 17 aa, synthetic construct
  REGION 1..17: note = TNR1B Linker (32-48)
EPSTAPSTSFLLPMGPS

SEQ ID NO: 3700 - protein, 16 aa, synthetic construct
  REGION 1..16: note = TNR1B Linker (33-48)
PSTAPSTSFLLPMGPS

SEQ ID NO: 3701 - protein, 15 aa, synthetic construct
  REGION 1..15: note = TNR1B Linker (34-48)
STAPSTSFLLPMGPS

SEQ ID NO: 3702 - protein, 14 aa, synthetic construct
  REGION 1..14: note = TNR1B Linker (35-48)
TAPSTSFLLPMGPS

SEQ ID NO: 3703 - protein, 13 aa, synthetic construct
  REGION 1..13: note = TNR1B Linker (36-48)
APSTSFLLPMGPS

SEQ ID NO: 3704 - protein, 12 aa, synthetic construct
  REGION 1..12: note = TNR1B Linker (37-48)
PSTSFLLPMGPS

SEQ ID NO: 3705 - protein, 11 aa, synthetic construct
  REGION 1..11: note = TNR1B Linker (38-48)
STSFLLPMGPS

SEQ ID NO: 3706 - protein, 10 aa, synthetic construct
  REGION 1..10: note = TNR1B Linker (39-48)
TSFLLPMGPS

SEQ ID NO: 3707 - protein, 9 aa, synthetic construct
  REGION 1..9: note = TNR1B Linker (40-48)
SFLLPMGPS

SEQ ID NO: 3708 - protein, 8 aa, synthetic construct
  REGION 1..8: note = TNR1B Linker (41-48)
FLLPMGPS

SEQ ID NO: 3709 - protein, 7 aa, synthetic construct
  REGION 1..7: note = TNR1B Linker (42-48)
LLPMGPS

SEQ ID NO: 3710 - protein, 6 aa, synthetic construct
  REGION 1..6: note = TNR1B Linker (43-48)
LPMGPS

SEQ ID NO: 3711 - protein, 5 aa, synthetic construct
  REGION 1..5: note = TNR1B Linker (44-48)
PMGPS

SEQ ID NO: 3712 - protein, 47 aa, synthetic construct
  REGION 1..47: note = TNR1B Linker (1-47)
TSTSPTRSMAPGAVHLPQPVSTRSQHTQPTPEPSTAPSTSFLLPMGP

SEQ ID NO: 3713 - protein, 46 aa, synthetic construct
  REGION 1..46: note = TNR1B Linker (2-47)
STSPTRSMAPGAVHLPQPVSTRSQHTQPTPEPSTAPSTSFLLPMGP

SEQ ID NO: 3714 - protein, 45 aa, synthetic construct
  REGION 1..45: note = TNR1B Linker (3-47)
TSPTRSMAPGAVHLPQPVSTRSQHTQPTPEPSTAPSTSFLLPMGP

SEQ ID NO: 3715 - protein, 44 aa, synthetic construct
  REGION 1..44: note = TNR1B Linker (4-47)
SPTRSMAPGAVHLPQPVSTRSQHTQPTPEPSTAPSTSFLLPMGP

SEQ ID NO: 3716 - protein, 43 aa, synthetic construct
  REGION 1..43: note = TNR1B Linker (5-47)
PTRSMAPGAVHLPQPVSTRSQHTQPTPEPSTAPSTSFLLPMGP

SEQ ID NO: 3717 - protein, 42 aa, synthetic construct
  REGION 1..42: note = TNR1B Linker (6-47)
TRSMAPGAVHLPQPVSTRSQHTQPTPEPSTAPSTSFLLPMGP

SEQ ID NO: 3718 - protein, 41 aa, synthetic construct
  REGION 1..41: note = TNR1B Linker (7-47)
RSMAPGAVHLPQPVSTRSQHTQPTPEPSTAPSTSFLLPMGP

SEQ ID NO: 3719 - protein, 40 aa, synthetic construct
  REGION 1..40: note = TNR1B Linker (8-47)
SMAPGAVHLPQPVSTRSQHTQPTPEPSTAPSTSFLLPMGP

SEQ ID NO: 3720 - protein, 39 aa, synthetic construct
  REGION 1..39: note = TNR1B Linker (9-47)
MAPGAVHLPQPVSTRSQHTQPTPEPSTAPSTSFLLPMGP

SEQ ID NO: 3721 - protein, 38 aa, synthetic construct
  REGION 1..38: note = TNR1B Linker (10-47)
APGAVHLPQPVSTRSQHTQPTPEPSTAPSTSFLLPMGP

SEQ ID NO: 3722 - protein, 37 aa, synthetic construct
  REGION 1..37: note = TNR1B Linker (11-47)
PGAVHLPQPVSTRSQHTQPTPEPSTAPSTSFLLPMGP

SEQ ID NO: 3723 - protein, 36 aa, synthetic construct
  REGION 1..36: note = TNR1B Linker (12-47)
GAVHLPQPVSTRSQHTQPTPEPSTAPSTSFLLPMGP

SEQ ID NO: 3724 - protein, 35 aa, synthetic construct
  REGION 1..35: note = TNR1B Linker (13-47)
AVHLPQPVSTRSQHTQPTPEPSTAPSTSFLLPMGP

SEQ ID NO: 3725 - protein, 34 aa, synthetic construct
  REGION 1..34: note = TNR1B Linker (14-47)
VHLPQPVSTRSQHTQPTPEPSTAPSTSFLLPMGP

SEQ ID NO: 3726 - protein, 33 aa, synthetic construct
  REGION 1..33: note = TNR1B Linker (15-47)
HLPQPVSTRSQHTQPTPEPSTAPSTSFLLPMGP

SEQ ID NO: 3727 - protein, 32 aa, synthetic construct
  REGION 1..32: note = TNR1B Linker (16-47)
LPQPVSTRSQHTQPTPEPSTAPSTSFLLPMGP

SEQ ID NO: 3728 - protein, 31 aa, synthetic construct
  REGION 1..31: note = TNR1B Linker (17-47)
PQPVSTRSQHTQPTPEPSTAPSTSFLLPMGP

SEQ ID NO: 3729 - protein, 30 aa, synthetic construct
  REGION 1..30: note = TNR1B Linker (18-47)
QPVSTRSQHTQPTPEPSTAPSTSFLLPMGP

SEQ ID NO: 3730 - protein, 29 aa, synthetic construct
  REGION 1..29: note = TNR1B Linker (19-47)
PVSTRSQHTQPTPEPSTAPSTSFLLPMGP

SEQ ID NO: 3731 - protein, 28 aa, synthetic construct
  REGION 1..28: note = TNR1B Linker (20-47)
VSTRSQHTQPTPEPSTAPSTSFLLPMGP

SEQ ID NO: 3732 - protein, 27 aa, synthetic construct
  REGION 1..27: note = TNR1B Linker (21-47)
STRSQHTQPTPEPSTAPSTSFLLPMGP

SEQ ID NO: 3733 - protein, 26 aa, synthetic construct
  REGION 1..26: note = TNR1B Linker (22-47)
TRSQHTQPTPEPSTAPSTSFLLPMGP

SEQ ID NO: 3734 - protein, 25 aa, synthetic construct
  REGION 1..25: note = TNR1B Linker (23-47)
RSQHTQPTPEPSTAPSTSFLLPMGP

SEQ ID NO: 3735 - protein, 24 aa, synthetic construct
  REGION 1..24: note = TNR1B Linker (24-47)
SQHTQPTPEPSTAPSTSFLLPMGP

SEQ ID NO: 3736 - protein, 23 aa, synthetic construct
  REGION 1..23: note = TNR1B Linker (25-47)
QHTQPTPEPSTAPSTSFLLPMGP

SEQ ID NO: 3737 - protein, 22 aa, synthetic construct
  REGION 1..22: note = TNR1B Linker (26-47)
HTQPTPEPSTAPSTSFLLPMGP

SEQ ID NO: 3738 - protein, 21 aa, synthetic construct
  REGION 1..21: note = TNR1B Linker (27-47)
TQPTPEPSTAPSTSFLLPMGP

SEQ ID NO: 3739 - protein, 20 aa, synthetic construct
  REGION 1..20: note = TNR1B Linker (28-47)
QPTPEPSTAPSTSFLLPMGP

SEQ ID NO: 3740 - protein, 19 aa, synthetic construct
  REGION 1..19: note = TNR1B Linker (29-47)
PTPEPSTAPSTSFLLPMGP

SEQ ID NO: 3741 - protein, 18 aa, synthetic construct
  REGION 1..18: note = TNR1B Linker (30-47)
TPEPSTAPSTSFLLPMGP

SEQ ID NO: 3742 - protein, 17 aa, synthetic construct
  REGION 1..17: note = TNR1B Linker (31-47)
PEPSTAPSTSFLLPMGP

SEQ ID NO: 3743 - protein, 16 aa, synthetic construct
  REGION 1..16: note = TNR1B Linker (32-47)
EPSTAPSTSFLLPMGP

SEQ ID NO: 3744 - protein, 15 aa, synthetic construct
  REGION 1..15: note = TNR1B Linker (33-47)
PSTAPSTSFLLPMGP

SEQ ID NO: 3745 - protein, 14 aa, synthetic construct
  REGION 1..14: note = TNR1B Linker (34-47)
STAPSTSFLLPMGP

SEQ ID NO: 3746 - protein, 13 aa, synthetic construct
  REGION 1..13: note = TNR1B Linker (35-47)
TAPSTSFLLPMGP

SEQ ID NO: 3747 - protein, 12 aa, synthetic construct
  REGION 1..12: note = TNR1B Linker (36-47)
APSTSFLLPMGP

SEQ ID NO: 3748 - protein, 11 aa, synthetic construct
  REGION 1..11: note = TNR1B Linker (37-47)
PSTSFLLPMGP

SEQ ID NO: 3749 - protein, 10 aa, synthetic construct
  REGION 1..10: note = TNR1B Linker (38-47)
STSFLLPMGP

SEQ ID NO: 3750 - protein, 9 aa, synthetic construct
  REGION 1..9: note = TNR1B Linker (39-47)
TSFLLPMGP

SEQ ID NO: 3751 - protein, 8 aa, synthetic construct
  REGION 1..8: note = TNR1B Linker (40-47)
SFLLPMGP

SEQ ID NO: 3752 - protein, 7 aa, synthetic construct
  REGION 1..7: note = TNR1B Linker (41-47)
FLLPMGP

SEQ ID NO: 3753 - protein, 6 aa, synthetic construct
  REGION 1..6: note = TNR1B Linker (42-47)
LLPMGP

SEQ ID NO: 3754 - protein, 5 aa, synthetic construct
  REGION 1..5: note = TNR1B Linker (43-47)
LPMGP

SEQ ID NO: 3755 - protein, 46 aa, synthetic construct
  REGION 1..46: note = TNR1B Linker (1-46)
TSTSPTRSMAPGAVHLPQPVSTRSQHTQPTPEPSTAPSTSFLLPMG

SEQ ID NO: 3756 - protein, 45 aa, synthetic construct
  REGION 1..45: note = TNR1B Linker (2-46)
STSPTRSMAPGAVHLPQPVSTRSQHTQPTPEPSTAPSTSFLLPMG

SEQ ID NO: 3757 - protein, 44 aa, synthetic construct
  REGION 1..44: note = TNR1B Linker (3-46)
TSPTRSMAPGAVHLPQPVSTRSQHTQPTPEPSTAPSTSFLLPMG

SEQ ID NO: 3758 - protein, 43 aa, synthetic construct
  REGION 1..43: note = TNR1B Linker (4-46)
SPTRSMAPGAVHLPQPVSTRSQHTQPTPEPSTAPSTSFLLPMG

SEQ ID NO: 3759 - protein, 42 aa, synthetic construct
  REGION 1..42: note = TNR1B Linker (5-46)
PTRSMAPGAVHLPQPVSTRSQHTQPTPEPSTAPSTSFLLPMG

SEQ ID NO: 3760 - protein, 41 aa, synthetic construct
  REGION 1..41: note = TNR1B Linker (6-46)
TRSMAPGAVHLPQPVSTRSQHTQPTPEPSTAPSTSFLLPMG

SEQ ID NO: 3761 - protein, 40 aa, synthetic construct
  REGION 1..40: note = TNR1B Linker (7-46)
RSMAPGAVHLPQPVSTRSQHTQPTPEPSTAPSTSFLLPMG

SEQ ID NO: 3762 - protein, 39 aa, synthetic construct
  REGION 1..39: note = TNR1B Linker (8-46)
SMAPGAVHLPQPVSTRSQHTQPTPEPSTAPSTSFLLPMG

SEQ ID NO: 3763 - protein, 38 aa, synthetic construct
  REGION 1..38: note = TNR1B Linker (9-46)
MAPGAVHLPQPVSTRSQHTQPTPEPSTAPSTSFLLPMG

SEQ ID NO: 3764 - protein, 37 aa, synthetic construct
  REGION 1..37: note = TNR1B Linker (10-46)
APGAVHLPQPVSTRSQHTQPTPEPSTAPSTSFLLPMG

SEQ ID NO: 3765 - protein, 36 aa, synthetic construct
  REGION 1..36: note = TNR1B Linker (11-46)
PGAVHLPQPVSTRSQHTQPTPEPSTAPSTSFLLPMG

SEQ ID NO: 3766 - protein, 35 aa, synthetic construct
  REGION 1..35: note = TNR1B Linker (12-46)
GAVHLPQPVSTRSQHTQPTPEPSTAPSTSFLLPMG

SEQ ID NO: 3767 - protein, 34 aa, synthetic construct
  REGION 1..34: note = TNR1B Linker (13-46)
AVHLPQPVSTRSQHTQPTPEPSTAPSTSFLLPMG

SEQ ID NO: 3768 - protein, 33 aa, synthetic construct
  REGION 1..33: note = TNR1B Linker (14-46)
VHLPQPVSTRSQHTQPTPEPSTAPSTSFLLPMG

SEQ ID NO: 3769 - protein, 32 aa, synthetic construct
  REGION 1..32: note = TNR1B Linker (15-46)
HLPQPVSTRSQHTQPTPEPSTAPSTSFLLPMG

SEQ ID NO: 3770 - protein, 31 aa, synthetic construct
  REGION 1..31: note = TNR1B Linker (16-46)
LPQPVSTRSQHTQPTPEPSTAPSTSFLLPMG

SEQ ID NO: 3771 - protein, 30 aa, synthetic construct
  REGION 1..30: note = TNR1B Linker (17-46)
PQPVSTRSQHTQPTPEPSTAPSTSFLLPMG

SEQ ID NO: 3772 - protein, 29 aa, synthetic construct
  REGION 1..29: note = TNR1B Linker (18-46)
QPVSTRSQHTQPTPEPSTAPSTSFLLPMG

SEQ ID NO: 3773 - protein, 28 aa, synthetic construct
  REGION 1..28: note = TNR1B Linker (19-46)
PVSTRSQHTQPTPEPSTAPSTSFLLPMG

SEQ ID NO: 3774 - protein, 27 aa, synthetic construct
  REGION 1..27: note = TNR1B Linker (20-46)
VSTRSQHTQPTPEPSTAPSTSFLLPMG

SEQ ID NO: 3775 - protein, 26 aa, synthetic construct
  REGION 1..26: note = TNR1B Linker (21-46)
STRSQHTQPTPEPSTAPSTSFLLPMG

SEQ ID NO: 3776 - protein, 25 aa, synthetic construct
  REGION 1..25: note = TNR1B Linker (22-46)
TRSQHTQPTPEPSTAPSTSFLLPMG

SEQ ID NO: 3777 - protein, 24 aa, synthetic construct
  REGION 1..24: note = TNR1B Linker (23-46)
RSQHTQPTPEPSTAPSTSFLLPMG

SEQ ID NO: 3778 - protein, 23 aa, synthetic construct
  REGION 1..23: note = TNR1B Linker (24-46)
SQHTQPTPEPSTAPSTSFLLPMG

SEQ ID NO: 3779 - protein, 22 aa, synthetic construct
  REGION 1..22: note = TNR1B Linker (25-46)
QHTQPTPEPSTAPSTSFLLPMG

SEQ ID NO: 3780 - protein, 21 aa, synthetic construct
  REGION 1..21: note = TNR1B Linker (26-46)
HTQPTPEPSTAPSTSFLLPMG

SEQ ID NO: 3781 - protein, 20 aa, synthetic construct
  REGION 1..20: note = TNR1B Linker (27-46)
TQPTPEPSTAPSTSFLLPMG

SEQ ID NO: 3782 - protein, 19 aa, synthetic construct
  REGION 1..19: note = TNR1B Linker (28-46)
QPTPEPSTAPSTSFLLPMG

SEQ ID NO: 3783 - protein, 18 aa, synthetic construct
  REGION 1..18: note = TNR1B Linker (29-46)
PTPEPSTAPSTSFLLPMG

SEQ ID NO: 3784 - protein, 17 aa, synthetic construct
  REGION 1..17: note = TNR1B Linker (30-46)
TPEPSTAPSTSFLLPMG

SEQ ID NO: 3785 - protein, 16 aa, synthetic construct
  REGION 1..16: note = TNR1B Linker (31-46)
PEPSTAPSTSFLLPMG

SEQ ID NO: 3786 - protein, 15 aa, synthetic construct
  REGION 1..15: note = TNR1B Linker (32-46)
EPSTAPSTSFLLPMG

SEQ ID NO: 3787 - protein, 14 aa, synthetic construct
  REGION 1..14: note = TNR1B Linker (33-46)
PSTAPSTSFLLPMG

SEQ ID NO: 3788 - protein, 13 aa, synthetic construct
  REGION 1..13: note = TNR1B Linker (34-46)
STAPSTSFLLPMG

SEQ ID NO: 3789 - protein, 12 aa, synthetic construct
  REGION 1..12: note = TNR1B Linker (35-46)
TAPSTSFLLPMG

SEQ ID NO: 3790 - protein, 11 aa, synthetic construct
  REGION 1..11: note = TNR1B Linker (36-46)
APSTSFLLPMG

SEQ ID NO: 3791 - protein, 10 aa, synthetic construct
  REGION 1..10: note = TNR1B Linker (37-46)
PSTSFLLPMG

SEQ ID NO: 3792 - protein, 9 aa, synthetic construct
  REGION 1..9: note = TNR1B Linker (38-46)
STSFLLPMG

SEQ ID NO: 3793 - protein, 8 aa, synthetic construct
  REGION 1..8: note = TNR1B Linker (39-46)
TSFLLPMG

SEQ ID NO: 3794 - protein, 7 aa, synthetic construct
  REGION 1..7: note = TNR1B Linker (40-46)
SFLLPMG

SEQ ID NO: 3795 - protein, 6 aa, synthetic construct
  REGION 1..6: note = TNR1B Linker (41-46)
FLLPMG

SEQ ID NO: 3796 - protein, 5 aa, synthetic construct
  REGION 1..5: note = TNR1B Linker (42-46)
LLPMG

SEQ ID NO: 3797 - protein, 45 aa, synthetic construct
  REGION 1..45: note = TNR1B Linker (1-45)
TSTSPTRSMAPGAVHLPQPVSTRSQHTQPTPEPSTAPSTSFLLPM

SEQ ID NO: 3798 - protein, 44 aa, synthetic construct
  REGION 1..44: note = TNR1B Linker (2-45)
STSPTRSMAPGAVHLPQPVSTRSQHTQPTPEPSTAPSTSFLLPM

SEQ ID NO: 3799 - protein, 43 aa, synthetic construct
  REGION 1..43: note = TNR1B Linker (3-45)
TSPTRSMAPGAVHLPQPVSTRSQHTQPTPEPSTAPSTSFLLPM

SEQ ID NO: 3800 - protein, 42 aa, synthetic construct
  REGION 1..42: note = TNR1B Linker (4-45)
SPTRSMAPGAVHLPQPVSTRSQHTQPTPEPSTAPSTSFLLPM

SEQ ID NO: 3801 - protein, 41 aa, synthetic construct
  REGION 1..41: note = TNR1B Linker (5-45)
PTRSMAPGAVHLPQPVSTRSQHTQPTPEPSTAPSTSFLLPM

SEQ ID NO: 3802 - protein, 40 aa, synthetic construct
  REGION 1..40: note = TNR1B Linker (6-45)
TRSMAPGAVHLPQPVSTRSQHTQPTPEPSTAPSTSFLLPM

SEQ ID NO: 3803 - protein, 39 aa, synthetic construct
  REGION 1..39: note = TNR1B Linker (7-45)
RSMAPGAVHLPQPVSTRSQHTQPTPEPSTAPSTSFLLPM

SEQ ID NO: 3804 - protein, 38 aa, synthetic construct
  REGION 1..38: note = TNR1B Linker (8-45)
SMAPGAVHLPQPVSTRSQHTQPTPEPSTAPSTSFLLPM

SEQ ID NO: 3805 - protein, 37 aa, synthetic construct
  REGION 1..37: note = TNR1B Linker (9-45)
MAPGAVHLPQPVSTRSQHTQPTPEPSTAPSTSFLLPM

SEQ ID NO: 3806 - protein, 36 aa, synthetic construct
  REGION 1..36: note = TNR1B Linker (10-45)
APGAVHLPQPVSTRSQHTQPTPEPSTAPSTSFLLPM

SEQ ID NO: 3807 - protein, 35 aa, synthetic construct
  REGION 1..35: note = TNR1B Linker (11-45)
PGAVHLPQPVSTRSQHTQPTPEPSTAPSTSFLLPM

SEQ ID NO: 3808 - protein, 34 aa, synthetic construct
  REGION 1..34: note = TNR1B Linker (12-45)
GAVHLPQPVSTRSQHTQPTPEPSTAPSTSFLLPM

SEQ ID NO: 3809 - protein, 33 aa, synthetic construct
  REGION 1..33: note = TNR1B Linker (13-45)
AVHLPQPVSTRSQHTQPTPEPSTAPSTSFLLPM

SEQ ID NO: 3810 - protein, 32 aa, synthetic construct
  REGION 1..32: note = TNR1B Linker (14-45)
VHLPQPVSTRSQHTQPTPEPSTAPSTSFLLPM

SEQ ID NO: 3811 - protein, 31 aa, synthetic construct
  REGION 1..31: note = TNR1B Linker (15-45)
HLPQPVSTRSQHTQPTPEPSTAPSTSFLLPM

SEQ ID NO: 3812 - protein, 30 aa, synthetic construct
  REGION 1..30: note = TNR1B Linker (16-45)
LPQPVSTRSQHTQPTPEPSTAPSTSFLLPM

SEQ ID NO: 3813 - protein, 29 aa, synthetic construct
  REGION 1..29: note = TNR1B Linker (17-45)
PQPVSTRSQHTQPTPEPSTAPSTSFLLPM

SEQ ID NO: 3814 - protein, 28 aa, synthetic construct
  REGION 1..28: note = TNR1B Linker (18-45)
QPVSTRSQHTQPTPEPSTAPSTSFLLPM

SEQ ID NO: 3815 - protein, 27 aa, synthetic construct
  REGION 1..27: note = TNR1B Linker (19-45)
PVSTRSQHTQPTPEPSTAPSTSFLLPM

SEQ ID NO: 3816 - protein, 26 aa, synthetic construct
  REGION 1..26: note = TNR1B Linker (20-45)
VSTRSQHTQPTPEPSTAPSTSFLLPM

SEQ ID NO: 3817 - protein, 25 aa, synthetic construct
  REGION 1..25: note = TNR1B Linker (21-45)
STRSQHTQPTPEPSTAPSTSFLLPM

SEQ ID NO: 3818 - protein, 24 aa, synthetic construct
  REGION 1..24: note = TNR1B Linker (22-45)
TRSQHTQPTPEPSTAPSTSFLLPM

SEQ ID NO: 3819 - protein, 23 aa, synthetic construct
  REGION 1..23: note = TNR1B Linker (23-45)
RSQHTQPTPEPSTAPSTSFLLPM

SEQ ID NO: 3820 - protein, 22 aa, synthetic construct
  REGION 1..22: note = TNR1B Linker (24-45)
SQHTQPTPEPSTAPSTSFLLPM

SEQ ID NO: 3821 - protein, 21 aa, synthetic construct
  REGION 1..21: note = TNR1B Linker (25-45)
QHTQPTPEPSTAPSTSFLLPM

SEQ ID NO: 3822 - protein, 20 aa, synthetic construct
  REGION 1..20: note = TNR1B Linker (26-45)
HTQPTPEPSTAPSTSFLLPM

SEQ ID NO: 3823 - protein, 19 aa, synthetic construct
  REGION 1..19: note = TNR1B Linker (27-45)
TQPTPEPSTAPSTSFLLPM

SEQ ID NO: 3824 - protein, 18 aa, synthetic construct
  REGION 1..18: note = TNR1B Linker (28-45)
QPTPEPSTAPSTSFLLPM

SEQ ID NO: 3825 - protein, 17 aa, synthetic construct
  REGION 1..17: note = TNR1B Linker (29-45)
PTPEPSTAPSTSFLLPM

SEQ ID NO: 3826 - protein, 16 aa, synthetic construct
  REGION 1..16: note = TNR1B Linker (30-45)
TPEPSTAPSTSFLLPM

SEQ ID NO: 3827 - protein, 15 aa, synthetic construct
  REGION 1..15: note = TNR1B Linker (31-45)
PEPSTAPSTSFLLPM

SEQ ID NO: 3828 - protein, 14 aa, synthetic construct
  REGION 1..14: note = TNR1B Linker (32-45)
EPSTAPSTSFLLPM

SEQ ID NO: 3829 - protein, 13 aa, synthetic construct
  REGION 1..13: note = TNR1B Linker (33-45)
PSTAPSTSFLLPM

SEQ ID NO: 3830 - protein, 12 aa, synthetic construct
  REGION 1..12: note = TNR1B Linker (34-45)
STAPSTSFLLPM

SEQ ID NO: 3831 - protein, 11 aa, synthetic construct
  REGION 1..11: note = TNR1B Linker (35-45)
TAPSTSFLLPM

SEQ ID NO: 3832 - protein, 10 aa, synthetic construct
  REGION 1..10: note = TNR1B Linker (36-45)
APSTSFLLPM

SEQ ID NO: 3833 - protein, 9 aa, synthetic construct
  REGION 1..9: note = TNR1B Linker (37-45)
PSTSFLLPM

SEQ ID NO: 3834 - protein, 8 aa, synthetic construct
  REGION 1..8: note = TNR1B Linker (38-45)
STSFLLPM

SEQ ID NO: 3835 - protein, 7 aa, synthetic construct
  REGION 1..7: note = TNR1B Linker (39-45)
TSFLLPM

SEQ ID NO: 3836 - protein, 6 aa, synthetic construct
  REGION 1..6: note = TNR1B Linker (40-45)
SFLLPM

SEQ ID NO: 3837 - protein, 5 aa, synthetic construct
  REGION 1..5: note = TNR1B Linker (41-45)
FLLPM

SEQ ID NO: 3838 - protein, 44 aa, synthetic construct
  REGION 1..44: note = TNR1B Linker (1-44)
TSTSPTRSMAPGAVHLPQPVSTRSQHTQPTPEPSTAPSTSFLLP

SEQ ID NO: 3839 - protein, 43 aa, synthetic construct
  REGION 1..43: note = TNR1B Linker (2-44)
STSPTRSMAPGAVHLPQPVSTRSQHTQPTPEPSTAPSTSFLLP

SEQ ID NO: 3840 - protein, 42 aa, synthetic construct
  REGION 1..42: note = TNR1B Linker (3-44)
TSPTRSMAPGAVHLPQPVSTRSQHTQPTPEPSTAPSTSFLLP

SEQ ID NO: 3841 - protein, 41 aa, synthetic construct
  REGION 1..41: note = TNR1B Linker (4-44)
SPTRSMAPGAVHLPQPVSTRSQHTQPTPEPSTAPSTSFLLP

SEQ ID NO: 3842 - protein, 40 aa, synthetic construct
  REGION 1..40: note = TNR1B Linker (5-44)
PTRSMAPGAVHLPQPVSTRSQHTQPTPEPSTAPSTSFLLP

SEQ ID NO: 3843 - protein, 39 aa, synthetic construct
  REGION 1..39: note = TNR1B Linker (6-44)
TRSMAPGAVHLPQPVSTRSQHTQPTPEPSTAPSTSFLLP

SEQ ID NO: 3844 - protein, 38 aa, synthetic construct
  REGION 1..38: note = TNR1B Linker (7-44)
RSMAPGAVHLPQPVSTRSQHTQPTPEPSTAPSTSFLLP

SEQ ID NO: 3845 - protein, 37 aa, synthetic construct
  REGION 1..37: note = TNR1B Linker (8-44)
SMAPGAVHLPQPVSTRSQHTQPTPEPSTAPSTSFLLP

SEQ ID NO: 3846 - protein, 36 aa, synthetic construct
  REGION 1..36: note = TNR1B Linker (9-44)
MAPGAVHLPQPVSTRSQHTQPTPEPSTAPSTSFLLP

SEQ ID NO: 3847 - protein, 35 aa, synthetic construct
  REGION 1..35: note = TNR1B Linker (10-44)
APGAVHLPQPVSTRSQHTQPTPEPSTAPSTSFLLP

SEQ ID NO: 3848 - protein, 34 aa, synthetic construct
  REGION 1..34: note = TNR1B Linker (11-44)
PGAVHLPQPVSTRSQHTQPTPEPSTAPSTSFLLP

SEQ ID NO: 3849 - protein, 33 aa, synthetic construct
  REGION 1..33: note = TNR1B Linker (12-44)
GAVHLPQPVSTRSQHTQPTPEPSTAPSTSFLLP

SEQ ID NO: 3850 - protein, 32 aa, synthetic construct
  REGION 1..32: note = TNR1B Linker (13-44)
AVHLPQPVSTRSQHTQPTPEPSTAPSTSFLLP

SEQ ID NO: 3851 - protein, 31 aa, synthetic construct
  REGION 1..31: note = TNR1B Linker (14-44)
VHLPQPVSTRSQHTQPTPEPSTAPSTSFLLP

SEQ ID NO: 3852 - protein, 30 aa, synthetic construct
  REGION 1..30: note = TNR1B Linker (15-44)
HLPQPVSTRSQHTQPTPEPSTAPSTSFLLP

SEQ ID NO: 3853 - protein, 29 aa, synthetic construct
  REGION 1..29: note = TNR1B Linker (16-44)
LPQPVSTRSQHTQPTPEPSTAPSTSFLLP

SEQ ID NO: 3854 - protein, 28 aa, synthetic construct
  REGION 1..28: note = TNR1B Linker (17-44)
PQPVSTRSQHTQPTPEPSTAPSTSFLLP

SEQ ID NO: 3855 - protein, 27 aa, synthetic construct
  REGION 1..27: note = TNR1B Linker (18-44)
QPVSTRSQHTQPTPEPSTAPSTSFLLP

SEQ ID NO: 3856 - protein, 26 aa, synthetic construct
  REGION 1..26: note = TNR1B Linker (19-44)
PVSTRSQHTQPTPEPSTAPSTSFLLP

SEQ ID NO: 3857 - protein, 25 aa, synthetic construct
  REGION 1..25: note = TNR1B Linker (20-44)
VSTRSQHTQPTPEPSTAPSTSFLLP

SEQ ID NO: 3858 - protein, 24 aa, synthetic construct
  REGION 1..24: note = TNR1B Linker (21-44)
STRSQHTQPTPEPSTAPSTSFLLP

SEQ ID NO: 3859 - protein, 23 aa, synthetic construct
  REGION 1..23: note = TNR1B Linker (22-44)
TRSQHTQPTPEPSTAPSTSFLLP

SEQ ID NO: 3860 - protein, 22 aa, synthetic construct
  REGION 1..22: note = TNR1B Linker (23-44)
RSQHTQPTPEPSTAPSTSFLLP

SEQ ID NO: 3861 - protein, 21 aa, synthetic construct
  REGION 1..21: note = TNR1B Linker (24-44)
SQHTQPTPEPSTAPSTSFLLP

SEQ ID NO: 3862 - protein, 20 aa, synthetic construct
  REGION 1..20: note = TNR1B Linker (25-44)
QHTQPTPEPSTAPSTSFLLP

SEQ ID NO: 3863 - protein, 19 aa, synthetic construct
  REGION 1..19: note = TNR1B Linker (26-44)
HTQPTPEPSTAPSTSFLLP

SEQ ID NO: 3864 - protein, 18 aa, synthetic construct
  REGION 1..18: note = TNR1B Linker (27-44)
TQPTPEPSTAPSTSFLLP

SEQ ID NO: 3865 - protein, 17 aa, synthetic construct
  REGION 1..17: note = TNR1B Linker (28-44)
QPTPEPSTAPSTSFLLP

SEQ ID NO: 3866 - protein, 16 aa, synthetic construct
  REGION 1..16: note = TNR1B Linker (29-44)
PTPEPSTAPSTSFLLP

SEQ ID NO: 3867 - protein, 15 aa, synthetic construct
  REGION 1..15: note = TNR1B Linker (30-44)
TPEPSTAPSTSFLLP

SEQ ID NO: 3868 - protein, 14 aa, synthetic construct
  REGION 1..14: note = TNR1B Linker (31-44)
PEPSTAPSTSFLLP

SEQ ID NO: 3869 - protein, 13 aa, synthetic construct
  REGION 1..13: note = TNR1B Linker (32-44)
EPSTAPSTSFLLP

SEQ ID NO: 3870 - protein, 12 aa, synthetic construct
  REGION 1..12: note = TNR1B Linker (33-44)
PSTAPSTSFLLP

SEQ ID NO: 3871 - protein, 11 aa, synthetic construct
  REGION 1..11: note = TNR1B Linker (34-44)
STAPSTSFLLP

SEQ ID NO: 3872 - protein, 10 aa, synthetic construct
  REGION 1..10: note = TNR1B Linker (35-44)
TAPSTSFLLP

SEQ ID NO: 3873 - protein, 9 aa, synthetic construct
  REGION 1..9: note = TNR1B Linker (36-44)
APSTSFLLP

SEQ ID NO: 3874 - protein, 8 aa, synthetic construct
  REGION 1..8: note = TNR1B Linker (37-44)
PSTSFLLP

SEQ ID NO: 3875 - protein, 7 aa, synthetic construct
  REGION 1..7: note = TNR1B Linker (38-44)
STSFLLP

SEQ ID NO: 3876 - protein, 6 aa, synthetic construct
  REGION 1..6: note = TNR1B Linker (39-44)
TSFLLP

SEQ ID NO: 3877 - protein, 5 aa, synthetic construct
  REGION 1..5: note = TNR1B Linker (40-44)
SFLLP

SEQ ID NO: 3878 - protein, 43 aa, synthetic construct
  REGION 1..43: note = TNR1B Linker (1-43)
TSTSPTRSMAPGAVHLPQPVSTRSQHTQPTPEPSTAPSTSFLL

SEQ ID NO: 3879 - protein, 42 aa, synthetic construct
  REGION 1..42: note = TNR1B Linker (2-43)
STSPTRSMAPGAVHLPQPVSTRSQHTQPTPEPSTAPSTSFLL

SEQ ID NO: 3880 - protein, 41 aa, synthetic construct
  REGION 1..41: note = TNR1B Linker (3-43)
TSPTRSMAPGAVHLPQPVSTRSQHTQPTPEPSTAPSTSFLL

SEQ ID NO: 3881 - protein, 40 aa, synthetic construct
  REGION 1..40: note = TNR1B Linker (4-43)
SPTRSMAPGAVHLPQPVSTRSQHTQPTPEPSTAPSTSFLL

SEQ ID NO: 3882 - protein, 39 aa, synthetic construct
  REGION 1..39: note = TNR1B Linker (5-43)
PTRSMAPGAVHLPQPVSTRSQHTQPTPEPSTAPSTSFLL

SEQ ID NO: 3883 - protein, 38 aa, synthetic construct
  REGION 1..38: note = TNR1B Linker (6-43)
TRSMAPGAVHLPQPVSTRSQHTQPTPEPSTAPSTSFLL

SEQ ID NO: 3884 - protein, 37 aa, synthetic construct
  REGION 1..37: note = TNR1B Linker (7-43)
RSMAPGAVHLPQPVSTRSQHTQPTPEPSTAPSTSFLL

SEQ ID NO: 3885 - protein, 36 aa, synthetic construct
  REGION 1..36: note = TNR1B Linker (8-43)
SMAPGAVHLPQPVSTRSQHTQPTPEPSTAPSTSFLL

SEQ ID NO: 3886 - protein, 35 aa, synthetic construct
  REGION 1..35: note = TNR1B Linker (9-43)
MAPGAVHLPQPVSTRSQHTQPTPEPSTAPSTSFLL

SEQ ID NO: 3887 - protein, 34 aa, synthetic construct
  REGION 1..34: note = TNR1B Linker (10-43)
APGAVHLPQPVSTRSQHTQPTPEPSTAPSTSFLL

SEQ ID NO: 3888 - protein, 33 aa, synthetic construct
  REGION 1..33: note = TNR1B Linker (11-43)
PGAVHLPQPVSTRSQHTQPTPEPSTAPSTSFLL

SEQ ID NO: 3889 - protein, 32 aa, synthetic construct
  REGION 1..32: note = TNR1B Linker (12-43)
GAVHLPQPVSTRSQHTQPTPEPSTAPSTSFLL

SEQ ID NO: 3890 - protein, 31 aa, synthetic construct
  REGION 1..31: note = TNR1B Linker (13-43)
AVHLPQPVSTRSQHTQPTPEPSTAPSTSFLL

SEQ ID NO: 3891 - protein, 30 aa, synthetic construct
  REGION 1..30: note = TNR1B Linker (14-43)
VHLPQPVSTRSQHTQPTPEPSTAPSTSFLL

SEQ ID NO: 3892 - protein, 29 aa, synthetic construct
  REGION 1..29: note = TNR1B Linker (15-43)
HLPQPVSTRSQHTQPTPEPSTAPSTSFLL

SEQ ID NO: 3893 - protein, 28 aa, synthetic construct
  REGION 1..28: note = TNR1B Linker (16-43)
LPQPVSTRSQHTQPTPEPSTAPSTSFLL

SEQ ID NO: 3894 - protein, 27 aa, synthetic construct
  REGION 1..27: note = TNR1B Linker (17-43)
PQPVSTRSQHTQPTPEPSTAPSTSFLL

SEQ ID NO: 3895 - protein, 26 aa, synthetic construct
  REGION 1..26: note = TNR1B Linker (18-43)
QPVSTRSQHTQPTPEPSTAPSTSFLL

SEQ ID NO: 3896 - protein, 25 aa, synthetic construct
  REGION 1..25: note = TNR1B Linker (19-43)
PVSTRSQHTQPTPEPSTAPSTSFLL

SEQ ID NO: 3897 - protein, 24 aa, synthetic construct
  REGION 1..24: note = TNR1B Linker (20-43)
VSTRSQHTQPTPEPSTAPSTSFLL

SEQ ID NO: 3898 - protein, 23 aa, synthetic construct
  REGION 1..23: note = TNR1B Linker (21-43)
STRSQHTQPTPEPSTAPSTSFLL

SEQ ID NO: 3899 - protein, 22 aa, synthetic construct
  REGION 1..22: note = TNR1B Linker (22-43)
TRSQHTQPTPEPSTAPSTSFLL

SEQ ID NO: 3900 - protein, 21 aa, synthetic construct
  REGION 1..21: note = TNR1B Linker (23-43)
RSQHTQPTPEPSTAPSTSFLL

SEQ ID NO: 3901 - protein, 20 aa, synthetic construct
  REGION 1..20: note = TNR1B Linker (24-43)
SQHTQPTPEPSTAPSTSFLL

SEQ ID NO: 3902 - protein, 19 aa, synthetic construct
  REGION 1..19: note = TNR1B Linker (25-43)
QHTQPTPEPSTAPSTSFLL

SEQ ID NO: 3903 - protein, 18 aa, synthetic construct
  REGION 1..18: note = TNR1B Linker (26-43)
HTQPTPEPSTAPSTSFLL

SEQ ID NO: 3904 - protein, 17 aa, synthetic construct
  REGION 1..17: note = TNR1B Linker (27-43)
TQPTPEPSTAPSTSFLL

SEQ ID NO: 3905 - protein, 16 aa, synthetic construct
  REGION 1..16: note = TNR1B Linker (28-43)
QPTPEPSTAPSTSFLL

SEQ ID NO: 3906 - protein, 15 aa, synthetic construct
  REGION 1..15: note = TNR1B Linker (29-43)
PTPEPSTAPSTSFLL

SEQ ID NO: 3907 - protein, 14 aa, synthetic construct
  REGION 1..14: note = TNR1B Linker (30-43)
TPEPSTAPSTSFLL

SEQ ID NO: 3908 - protein, 13 aa, synthetic construct
  REGION 1..13: note = TNR1B Linker (31-43)
PEPSTAPSTSFLL

SEQ ID NO: 3909 - protein, 12 aa, synthetic construct
  REGION 1..12: note = TNR1B Linker (32-43)
EPSTAPSTSFLL

SEQ ID NO: 3910 - protein, 11 aa, synthetic construct
  REGION 1..11: note = TNR1B Linker (33-43)
PSTAPSTSFLL

SEQ ID NO: 3911 - protein, 10 aa, synthetic construct
  REGION 1..10: note = TNR1B Linker (34-43)
STAPSTSFLL

SEQ ID NO: 3912 - protein, 9 aa, synthetic construct
  REGION 1..9: note = TNR1B Linker (35-43)
TAPSTSFLL

SEQ ID NO: 3913 - protein, 8 aa, synthetic construct
  REGION 1..8: note = TNR1B Linker (36-43)
APSTSFLL

SEQ ID NO: 3914 - protein, 7 aa, synthetic construct
  REGION 1..7: note = TNR1B Linker (37-43)
PSTSFLL

SEQ ID NO: 3915 - protein, 6 aa, synthetic construct
  REGION 1..6: note = TNR1B Linker (38-43)
STSFLL

SEQ ID NO: 3916 - protein, 5 aa, synthetic construct
  REGION 1..5: note = TNR1B Linker (39-43)
TSFLL

SEQ ID NO: 3917 - protein, 42 aa, synthetic construct
  REGION 1..42: note = TNR1B Linker (1-42)
TSTSPTRSMAPGAVHLPQPVSTRSQHTQPTPEPSTAPSTSFL

SEQ ID NO: 3918 - protein, 41 aa, synthetic construct
  REGION 1..41: note = TNR1B Linker (2-42)
STSPTRSMAPGAVHLPQPVSTRSQHTQPTPEPSTAPSTSFL

SEQ ID NO: 3919 - protein, 40 aa, synthetic construct
  REGION 1..40: note = TNR1B Linker (3-42)
TSPTRSMAPGAVHLPQPVSTRSQHTQPTPEPSTAPSTSFL

SEQ ID NO: 3920 - protein, 39 aa, synthetic construct
  REGION 1..39: note = TNR1B Linker (4-42)
SPTRSMAPGAVHLPQPVSTRSQHTQPTPEPSTAPSTSFL

SEQ ID NO: 3921 - protein, 38 aa, synthetic construct
  REGION 1..38: note = TNR1B Linker (5-42)
PTRSMAPGAVHLPQPVSTRSQHTQPTPEPSTAPSTSFL

SEQ ID NO: 3922 - protein, 37 aa, synthetic construct
  REGION 1..37: note = TNR1B Linker (6-42)
TRSMAPGAVHLPQPVSTRSQHTQPTPEPSTAPSTSFL

SEQ ID NO: 3923 - protein, 36 aa, synthetic construct
  REGION 1..36: note = TNR1B Linker (7-42)
RSMAPGAVHLPQPVSTRSQHTQPTPEPSTAPSTSFL

SEQ ID NO: 3924 - protein, 35 aa, synthetic construct
  REGION 1..35: note = TNR1B Linker (8-42)
SMAPGAVHLPQPVSTRSQHTQPTPEPSTAPSTSFL

SEQ ID NO: 3925 - protein, 34 aa, synthetic construct
  REGION 1..34: note = TNR1B Linker (9-42)
MAPGAVHLPQPVSTRSQHTQPTPEPSTAPSTSFL

SEQ ID NO: 3926 - protein, 33 aa, synthetic construct
  REGION 1..33: note = TNR1B Linker (10-42)
APGAVHLPQPVSTRSQHTQPTPEPSTAPSTSFL

SEQ ID NO: 3927 - protein, 32 aa, synthetic construct
  REGION 1..32: note = TNR1B Linker (11-42)
PGAVHLPQPVSTRSQHTQPTPEPSTAPSTSFL

SEQ ID NO: 3928 - protein, 31 aa, synthetic construct
  REGION 1..31: note = TNR1B Linker (12-42)
GAVHLPQPVSTRSQHTQPTPEPSTAPSTSFL

SEQ ID NO: 3929 - protein, 30 aa, synthetic construct
  REGION 1..30: note = TNR1B Linker (13-42)
AVHLPQPVSTRSQHTQPTPEPSTAPSTSFL

SEQ ID NO: 3930 - protein, 29 aa, synthetic construct
  REGION 1..29: note = TNR1B Linker (14-42)
VHLPQPVSTRSQHTQPTPEPSTAPSTSFL

SEQ ID NO: 3931 - protein, 28 aa, synthetic construct
  REGION 1..28: note = TNR1B Linker (15-42)
HLPQPVSTRSQHTQPTPEPSTAPSTSFL

SEQ ID NO: 3932 - protein, 27 aa, synthetic construct
  REGION 1..27: note = TNR1B Linker (16-42)
LPQPVSTRSQHTQPTPEPSTAPSTSFL

SEQ ID NO: 3933 - protein, 26 aa, synthetic construct
  REGION 1..26: note = TNR1B Linker (17-42)
PQPVSTRSQHTQPTPEPSTAPSTSFL

SEQ ID NO: 3934 - protein, 25 aa, synthetic construct
  REGION 1..25: note = TNR1B Linker (18-42)
QPVSTRSQHTQPTPEPSTAPSTSFL

SEQ ID NO: 3935 - protein, 24 aa, synthetic construct
  REGION 1..24: note = TNR1B Linker (19-42)
PVSTRSQHTQPTPEPSTAPSTSFL

SEQ ID NO: 3936 - protein, 23 aa, synthetic construct
  REGION 1..23: note = TNR1B Linker (20-42)
VSTRSQHTQPTPEPSTAPSTSFL

SEQ ID NO: 3937 - protein, 22 aa, synthetic construct
  REGION 1..22: note = TNR1B Linker (21-42)
STRSQHTQPTPEPSTAPSTSFL

SEQ ID NO: 3938 - protein, 21 aa, synthetic construct
  REGION 1..21: note = TNR1B Linker (22-42)
TRSQHTQPTPEPSTAPSTSFL

SEQ ID NO: 3939 - protein, 20 aa, synthetic construct
  REGION 1..20: note = TNR1B Linker (23-42)
RSQHTQPTPEPSTAPSTSFL

SEQ ID NO: 3940 - protein, 19 aa, synthetic construct
  REGION 1..19: note = TNR1B Linker (24-42)
SQHTQPTPEPSTAPSTSFL

SEQ ID NO: 3941 - protein, 18 aa, synthetic construct
  REGION 1..18: note = TNR1B Linker (25-42)
QHTQPTPEPSTAPSTSFL

SEQ ID NO: 3942 - protein, 17 aa, synthetic construct
  REGION 1..17: note = TNR1B Linker (26-42)
HTQPTPEPSTAPSTSFL

SEQ ID NO: 3943 - protein, 16 aa, synthetic construct
  REGION 1..16: note = TNR1B Linker (27-42)
TQPTPEPSTAPSTSFL

SEQ ID NO: 3944 - protein, 15 aa, synthetic construct
  REGION 1..15: note = TNR1B Linker (28-42)
QPTPEPSTAPSTSFL

SEQ ID NO: 3945 - protein, 14 aa, synthetic construct
  REGION 1..14: note = TNR1B Linker (29-42)
PTPEPSTAPSTSFL

SEQ ID NO: 3946 - protein, 13 aa, synthetic construct
  REGION 1..13: note = TNR1B Linker (30-42)
TPEPSTAPSTSFL

SEQ ID NO: 3947 - protein, 12 aa, synthetic construct
  REGION 1..12: note = TNR1B Linker (31-42)
PEPSTAPSTSFL

SEQ ID NO: 3948 - protein, 11 aa, synthetic construct
  REGION 1..11: note = TNR1B Linker (32-42)
EPSTAPSTSFL

SEQ ID NO: 3949 - protein, 10 aa, synthetic construct
  REGION 1..10: note = TNR1B Linker (33-42)
PSTAPSTSFL

SEQ ID NO: 3950 - protein, 9 aa, synthetic construct
  REGION 1..9: note = TNR1B Linker (34-42)
STAPSTSFL

SEQ ID NO: 3951 - protein, 8 aa, synthetic construct
  REGION 1..8: note = TNR1B Linker (35-42)
TAPSTSFL

SEQ ID NO: 3952 - protein, 7 aa, synthetic construct
  REGION 1..7: note = TNR1B Linker (36-42)
APSTSFL

SEQ ID NO: 3953 - protein, 6 aa, synthetic construct
  REGION 1..6: note = TNR1B Linker (37-42)
PSTSFL

SEQ ID NO: 3954 - protein, 5 aa, synthetic construct
  REGION 1..5: note = TNR1B Linker (38-42)
STSFL

SEQ ID NO: 3955 - protein, 41 aa, synthetic construct
  REGION 1..41: note = TNR1B Linker (1-41)
TSTSPTRSMAPGAVHLPQPVSTRSQHTQPTPEPSTAPSTSF

SEQ ID NO: 3956 - protein, 40 aa, synthetic construct
  REGION 1..40: note = TNR1B Linker (2-41)
STSPTRSMAPGAVHLPQPVSTRSQHTQPTPEPSTAPSTSF

SEQ ID NO: 3957 - protein, 39 aa, synthetic construct
  REGION 1..39: note = TNR1B Linker (3-41)
TSPTRSMAPGAVHLPQPVSTRSQHTQPTPEPSTAPSTSF

SEQ ID NO: 3958 - protein, 38 aa, synthetic construct
  REGION 1..38: note = TNR1B Linker (4-41)
SPTRSMAPGAVHLPQPVSTRSQHTQPTPEPSTAPSTSF

SEQ ID NO: 3959 - protein, 37 aa, synthetic construct
  REGION 1..37: note = TNR1B Linker (5-41)
PTRSMAPGAVHLPQPVSTRSQHTQPTPEPSTAPSTSF

SEQ ID NO: 3960 - protein, 36 aa, synthetic construct
  REGION 1..36: note = TNR1B Linker (6-41)
TRSMAPGAVHLPQPVSTRSQHTQPTPEPSTAPSTSF

SEQ ID NO: 3961 - protein, 35 aa, synthetic construct
  REGION 1..35: note = TNR1B Linker (7-41)
RSMAPGAVHLPQPVSTRSQHTQPTPEPSTAPSTSF

SEQ ID NO: 3962 - protein, 34 aa, synthetic construct
  REGION 1..34: note = TNR1B Linker (8-41)
SMAPGAVHLPQPVSTRSQHTQPTPEPSTAPSTSF

SEQ ID NO: 3963 - protein, 33 aa, synthetic construct
  REGION 1..33: note = TNR1B Linker (9-41)
MAPGAVHLPQPVSTRSQHTQPTPEPSTAPSTSF

SEQ ID NO: 3964 - protein, 32 aa, synthetic construct
  REGION 1..32: note = TNR1B Linker (10-41)
APGAVHLPQPVSTRSQHTQPTPEPSTAPSTSF

SEQ ID NO: 3965 - protein, 31 aa, synthetic construct
  REGION 1..31: note = TNR1B Linker (11-41)
PGAVHLPQPVSTRSQHTQPTPEPSTAPSTSF

SEQ ID NO: 3966 - protein, 30 aa, synthetic construct
  REGION 1..30: note = TNR1B Linker (12-41)
GAVHLPQPVSTRSQHTQPTPEPSTAPSTSF

SEQ ID NO: 3967 - protein, 29 aa, synthetic construct
  REGION 1..29: note = TNR1B Linker (13-41)
AVHLPQPVSTRSQHTQPTPEPSTAPSTSF

SEQ ID NO: 3968 - protein, 28 aa, synthetic construct
  REGION 1..28: note = TNR1B Linker (14-41)
VHLPQPVSTRSQHTQPTPEPSTAPSTSF

SEQ ID NO: 3969 - protein, 27 aa, synthetic construct
  REGION 1..27: note = TNR1B Linker (15-41)
HLPQPVSTRSQHTQPTPEPSTAPSTSF

SEQ ID NO: 3970 - protein, 26 aa, synthetic construct
  REGION 1..26: note = TNR1B Linker (16-41)
LPQPVSTRSQHTQPTPEPSTAPSTSF

SEQ ID NO: 3971 - protein, 25 aa, synthetic construct
  REGION 1..25: note = TNR1B Linker (17-41)
PQPVSTRSQHTQPTPEPSTAPSTSF

SEQ ID NO: 3972 - protein, 24 aa, synthetic construct
  REGION 1..24: note = TNR1B Linker (18-41)
QPVSTRSQHTQPTPEPSTAPSTSF

SEQ ID NO: 3973 - protein, 23 aa, synthetic construct
  REGION 1..23: note = TNR1B Linker (19-41)
PVSTRSQHTQPTPEPSTAPSTSF

SEQ ID NO: 3974 - protein, 22 aa, synthetic construct
  REGION 1..22: note = TNR1B Linker (20-41)
VSTRSQHTQPTPEPSTAPSTSF

SEQ ID NO: 3975 - protein, 21 aa, synthetic construct
  REGION 1..21: note = TNR1B Linker (21-41)
STRSQHTQPTPEPSTAPSTSF

SEQ ID NO: 3976 - protein, 20 aa, synthetic construct
  REGION 1..20: note = TNR1B Linker (22-41)
TRSQHTQPTPEPSTAPSTSF

SEQ ID NO: 3977 - protein, 19 aa, synthetic construct
  REGION 1..19: note = TNR1B Linker (23-41)
RSQHTQPTPEPSTAPSTSF

SEQ ID NO: 3978 - protein, 18 aa, synthetic construct
  REGION 1..18: note = TNR1B Linker (24-41)
SQHTQPTPEPSTAPSTSF

SEQ ID NO: 3979 - protein, 17 aa, synthetic construct
  REGION 1..17: note = TNR1B Linker (25-41)
QHTQPTPEPSTAPSTSF

SEQ ID NO: 3980 - protein, 16 aa, synthetic construct
  REGION 1..16: note = TNR1B Linker (26-41)
HTQPTPEPSTAPSTSF

SEQ ID NO: 3981 - protein, 15 aa, synthetic construct
  REGION 1..15: note = TNR1B Linker (27-41)
TQPTPEPSTAPSTSF

SEQ ID NO: 3982 - protein, 14 aa, synthetic construct
  REGION 1..14: note = TNR1B Linker (28-41)
QPTPEPSTAPSTSF

SEQ ID NO: 3983 - protein, 13 aa, synthetic construct
  REGION 1..13: note = TNR1B Linker (29-41)
PTPEPSTAPSTSF

SEQ ID NO: 3984 - protein, 12 aa, synthetic construct
  REGION 1..12: note = TNR1B Linker (30-41)
TPEPSTAPSTSF

SEQ ID NO: 3985 - protein, 11 aa, synthetic construct
  REGION 1..11: note = TNR1B Linker (31-41)
PEPSTAPSTSF

SEQ ID NO: 3986 - protein, 10 aa, synthetic construct
  REGION 1..10: note = TNR1B Linker (32-41)
EPSTAPSTSF

SEQ ID NO: 3987 - protein, 9 aa, synthetic construct
  REGION 1..9: note = TNR1B Linker (33-41)
PSTAPSTSF

SEQ ID NO: 3988 - protein, 8 aa, synthetic construct
  REGION 1..8: note = TNR1B Linker (34-41)
STAPSTSF

SEQ ID NO: 3989 - protein, 7 aa, synthetic construct
  REGION 1..7: note = TNR1B Linker (35-41)
TAPSTSF

SEQ ID NO: 3990 - protein, 6 aa, synthetic construct
  REGION 1..6: note = TNR1B Linker (36-41)
APSTSF

SEQ ID NO: 3991 - protein, 5 aa, synthetic construct
  REGION 1..5: note = TNR1B Linker (37-41)
PSTSF

SEQ ID NO: 3992 - protein, 40 aa, synthetic construct
  REGION 1..40: note = TNR1B Linker (1-40)
TSTSPTRSMAPGAVHLPQPVSTRSQHTQPTPEPSTAPSTS

SEQ ID NO: 3993 - protein, 39 aa, synthetic construct
  REGION 1..39: note = TNR1B Linker (2-40)
STSPTRSMAPGAVHLPQPVSTRSQHTQPTPEPSTAPSTS

SEQ ID NO: 3994 - protein, 38 aa, synthetic construct
  REGION 1..38: note = TNR1B Linker (3-40)
TSPTRSMAPGAVHLPQPVSTRSQHTQPTPEPSTAPSTS

SEQ ID NO: 3995 - protein, 37 aa, synthetic construct
  REGION 1..37: note = TNR1B Linker (4-40)
SPTRSMAPGAVHLPQPVSTRSQHTQPTPEPSTAPSTS

SEQ ID NO: 3996 - protein, 36 aa, synthetic construct
  REGION 1..36: note = TNR1B Linker (5-40)
PTRSMAPGAVHLPQPVSTRSQHTQPTPEPSTAPSTS

SEQ ID NO: 3997 - protein, 35 aa, synthetic construct
  REGION 1..35: note = TNR1B Linker (6-40)
TRSMAPGAVHLPQPVSTRSQHTQPTPEPSTAPSTS

SEQ ID NO: 3998 - protein, 34 aa, synthetic construct
  REGION 1..34: note = TNR1B Linker (7-40)
RSMAPGAVHLPQPVSTRSQHTQPTPEPSTAPSTS

SEQ ID NO: 3999 - protein, 33 aa, synthetic construct
  REGION 1..33: note = TNR1B Linker (8-40)
SMAPGAVHLPQPVSTRSQHTQPTPEPSTAPSTS

SEQ ID NO: 4000 - protein, 32 aa, synthetic construct
  REGION 1..32: note = TNR1B Linker (9-40)
MAPGAVHLPQPVSTRSQHTQPTPEPSTAPSTS

SEQ ID NO: 4001 - protein, 31 aa, synthetic construct
  REGION 1..31: note = TNR1B Linker (10-40)
APGAVHLPQPVSTRSQHTQPTPEPSTAPSTS

SEQ ID NO: 4002 - protein, 30 aa, synthetic construct
  REGION 1..30: note = TNR1B Linker (11-40)
PGAVHLPQPVSTRSQHTQPTPEPSTAPSTS

SEQ ID NO: 4003 - protein, 29 aa, synthetic construct
  REGION 1..29: note = TNR1B Linker (12-40)
GAVHLPQPVSTRSQHTQPTPEPSTAPSTS

SEQ ID NO: 4004 - protein, 28 aa, synthetic construct
  REGION 1..28: note = TNR1B Linker (13-40)
AVHLPQPVSTRSQHTQPTPEPSTAPSTS

SEQ ID NO: 4005 - protein, 27 aa, synthetic construct
  REGION 1..27: note = TNR1B Linker (14-40)
VHLPQPVSTRSQHTQPTPEPSTAPSTS

SEQ ID NO: 4006 - protein, 26 aa, synthetic construct
  REGION 1..26: note = TNR1B Linker (15-40)
HLPQPVSTRSQHTQPTPEPSTAPSTS

SEQ ID NO: 4007 - protein, 25 aa, synthetic construct
  REGION 1..25: note = TNR1B Linker (16-40)
LPQPVSTRSQHTQPTPEPSTAPSTS

SEQ ID NO: 4008 - protein, 24 aa, synthetic construct
  REGION 1..24: note = TNR1B Linker (17-40)
PQPVSTRSQHTQPTPEPSTAPSTS

SEQ ID NO: 4009 - protein, 23 aa, synthetic construct
  REGION 1..23: note = TNR1B Linker (18-40)
QPVSTRSQHTQPTPEPSTAPSTS

SEQ ID NO: 4010 - protein, 22 aa, synthetic construct
  REGION 1..22: note = TNR1B Linker (19-40)
PVSTRSQHTQPTPEPSTAPSTS

SEQ ID NO: 4011 - protein, 21 aa, synthetic construct
  REGION 1..21: note = TNR1B Linker (20-40)
VSTRSQHTQPTPEPSTAPSTS

SEQ ID NO: 4012 - protein, 20 aa, synthetic construct
  REGION 1..20: note = TNR1B Linker (21-40)
STRSQHTQPTPEPSTAPSTS

SEQ ID NO: 4013 - protein, 19 aa, synthetic construct
  REGION 1..19: note = TNR1B Linker (22-40)
TRSQHTQPTPEPSTAPSTS

SEQ ID NO: 4014 - protein, 18 aa, synthetic construct
  REGION 1..18: note = TNR1B Linker (23-40)
RSQHTQPTPEPSTAPSTS

SEQ ID NO: 4015 - protein, 17 aa, synthetic construct
  REGION 1..17: note = TNR1B Linker (24-40)
SQHTQPTPEPSTAPSTS

SEQ ID NO: 4016 - protein, 16 aa, synthetic construct
  REGION 1..16: note = TNR1B Linker (25-40)
QHTQPTPEPSTAPSTS

SEQ ID NO: 4017 - protein, 15 aa, synthetic construct
  REGION 1..15: note = TNR1B Linker (26-40)
HTQPTPEPSTAPSTS

SEQ ID NO: 4018 - protein, 14 aa, synthetic construct
  REGION 1..14: note = TNR1B Linker (27-40)
TQPTPEPSTAPSTS

SEQ ID NO: 4019 - protein, 13 aa, synthetic construct
  REGION 1..13: note = TNR1B Linker (28-40)
QPTPEPSTAPSTS

SEQ ID NO: 4020 - protein, 12 aa, synthetic construct
  REGION 1..12: note = TNR1B Linker (29-40)
PTPEPSTAPSTS

SEQ ID NO: 4021 - protein, 11 aa, synthetic construct
  REGION 1..11: note = TNR1B Linker (30-40)
TPEPSTAPSTS

SEQ ID NO: 4022 - protein, 10 aa, synthetic construct
  REGION 1..10: note = TNR1B Linker (31-40)
PEPSTAPSTS

SEQ ID NO: 4023 - protein, 9 aa, synthetic construct
  REGION 1..9: note = TNR1B Linker (32-40)
EPSTAPSTS

SEQ ID NO: 4024 - protein, 8 aa, synthetic construct
  REGION 1..8: note = TNR1B Linker (33-40)
PSTAPSTS

SEQ ID NO: 4025 - protein, 7 aa, synthetic construct
  REGION 1..7: note = TNR1B Linker (34-40)
STAPSTS

SEQ ID NO: 4026 - protein, 6 aa, synthetic construct
  REGION 1..6: note = TNR1B Linker (35-40)
TAPSTS

SEQ ID NO: 4027 - protein, 5 aa, synthetic construct
  REGION 1..5: note = TNR1B Linker (36-40)
APSTS

SEQ ID NO: 4028 - protein, 39 aa, synthetic construct
  REGION 1..39: note = TNR1B Linker (1-39)
TSTSPTRSMAPGAVHLPQPVSTRSQHTQPTPEPSTAPST

SEQ ID NO: 4029 - protein, 38 aa, synthetic construct
  REGION 1..38: note = TNR1B Linker (2-39)
STSPTRSMAPGAVHLPQPVSTRSQHTQPTPEPSTAPST

SEQ ID NO: 4030 - protein, 37 aa, synthetic construct
  REGION 1..37: note = TNR1B Linker (3-39)
TSPTRSMAPGAVHLPQPVSTRSQHTQPTPEPSTAPST

SEQ ID NO: 4031 - protein, 36 aa, synthetic construct
  REGION 1..36: note = TNR1B Linker (4-39)
SPTRSMAPGAVHLPQPVSTRSQHTQPTPEPSTAPST

SEQ ID NO: 4032 - protein, 35 aa, synthetic construct
  REGION 1..35: note = TNR1B Linker (5-39)
PTRSMAPGAVHLPQPVSTRSQHTQPTPEPSTAPST

SEQ ID NO: 4033 - protein, 34 aa, synthetic construct
  REGION 1..34: note = TNR1B Linker (6-39)
TRSMAPGAVHLPQPVSTRSQHTQPTPEPSTAPST

SEQ ID NO: 4034 - protein, 33 aa, synthetic construct
  REGION 1..33: note = TNR1B Linker (7-39)
RSMAPGAVHLPQPVSTRSQHTQPTPEPSTAPST

SEQ ID NO: 4035 - protein, 32 aa, synthetic construct
  REGION 1..32: note = TNR1B Linker (8-39)
SMAPGAVHLPQPVSTRSQHTQPTPEPSTAPST

SEQ ID NO: 4036 - protein, 31 aa, synthetic construct
  REGION 1..31: note = TNR1B Linker (9-39)
MAPGAVHLPQPVSTRSQHTQPTPEPSTAPST

SEQ ID NO: 4037 - protein, 30 aa, synthetic construct
  REGION 1..30: note = TNR1B Linker (10-39)
APGAVHLPQPVSTRSQHTQPTPEPSTAPST

SEQ ID NO: 4038 - protein, 29 aa, synthetic construct
  REGION 1..29: note = TNR1B Linker (11-39)
PGAVHLPQPVSTRSQHTQPTPEPSTAPST

SEQ ID NO: 4039 - protein, 28 aa, synthetic construct
  REGION 1..28: note = TNR1B Linker (12-39)
GAVHLPQPVSTRSQHTQPTPEPSTAPST

SEQ ID NO: 4040 - protein, 27 aa, synthetic construct
  REGION 1..27: note = TNR1B Linker (13-39)
AVHLPQPVSTRSQHTQPTPEPSTAPST

SEQ ID NO: 4041 - protein, 26 aa, synthetic construct
  REGION 1..26: note = TNR1B Linker (14-39)
VHLPQPVSTRSQHTQPTPEPSTAPST

SEQ ID NO: 4042 - protein, 25 aa, synthetic construct
  REGION 1..25: note = TNR1B Linker (15-39)
HLPQPVSTRSQHTQPTPEPSTAPST

SEQ ID NO: 4043 - protein, 24 aa, synthetic construct
  REGION 1..24: note = TNR1B Linker (16-39)
LPQPVSTRSQHTQPTPEPSTAPST

SEQ ID NO: 4044 - protein, 23 aa, synthetic construct
  REGION 1..23: note = TNR1B Linker (17-39)
PQPVSTRSQHTQPTPEPSTAPST

SEQ ID NO: 4045 - protein, 22 aa, synthetic construct
  REGION 1..22: note = TNR1B Linker (18-39)
QPVSTRSQHTQPTPEPSTAPST

SEQ ID NO: 4046 - protein, 21 aa, synthetic construct
  REGION 1..21: note = TNR1B Linker (19-39)
PVSTRSQHTQPTPEPSTAPST

SEQ ID NO: 4047 - protein, 20 aa, synthetic construct
  REGION 1..20: note = TNR1B Linker (20-39)
VSTRSQHTQPTPEPSTAPST

SEQ ID NO: 4048 - protein, 19 aa, synthetic construct
  REGION 1..19: note = TNR1B Linker (21-39)
STRSQHTQPTPEPSTAPST

SEQ ID NO: 4049 - protein, 18 aa, synthetic construct
  REGION 1..18: note = TNR1B Linker (22-39)
TRSQHTQPTPEPSTAPST

SEQ ID NO: 4050 - protein, 17 aa, synthetic construct
  REGION 1..17: note = TNR1B Linker (23-39)
RSQHTQPTPEPSTAPST

SEQ ID NO: 4051 - protein, 16 aa, synthetic construct
  REGION 1..16: note = TNR1B Linker (24-39)
SQHTQPTPEPSTAPST

SEQ ID NO: 4052 - protein, 15 aa, synthetic construct
  REGION 1..15: note = TNR1B Linker (25-39)
QHTQPTPEPSTAPST

SEQ ID NO: 4053 - protein, 14 aa, synthetic construct
  REGION 1..14: note = TNR1B Linker (26-39)
HTQPTPEPSTAPST

SEQ ID NO: 4054 - protein, 13 aa, synthetic construct
  REGION 1..13: note = TNR1B Linker (27-39)
TQPTPEPSTAPST

SEQ ID NO: 4055 - protein, 12 aa, synthetic construct
  REGION 1..12: note = TNR1B Linker (28-39)
QPTPEPSTAPST

SEQ ID NO: 4056 - protein, 11 aa, synthetic construct
  REGION 1..11: note = TNR1B Linker (29-39)
PTPEPSTAPST

SEQ ID NO: 4057 - protein, 10 aa, synthetic construct
  REGION 1..10: note = TNR1B Linker (30-39)
TPEPSTAPST

SEQ ID NO: 4058 - protein, 9 aa, synthetic construct
  REGION 1..9: note = TNR1B Linker (31-39)
PEPSTAPST

SEQ ID NO: 4059 - protein, 8 aa, synthetic construct
  REGION 1..8: note = TNR1B Linker (32-39)
EPSTAPST

SEQ ID NO: 4060 - protein, 7 aa, synthetic construct
  REGION 1..7: note = TNR1B Linker (33-39)
PSTAPST

SEQ ID NO: 4061 - protein, 6 aa, synthetic construct
  REGION 1..6: note = TNR1B Linker (34-39)
STAPST

SEQ ID NO: 4062 - protein, 5 aa, synthetic construct
  REGION 1..5: note = TNR1B Linker (35-39)
TAPST

SEQ ID NO: 4063 - protein, 38 aa, synthetic construct
  REGION 1..38: note = TNR1B Linker (1-38)
TSTSPTRSMAPGAVHLPQPVSTRSQHTQPTPEPSTAPS

SEQ ID NO: 4064 - protein, 37 aa, synthetic construct
  REGION 1..37: note = TNR1B Linker (2-38)
STSPTRSMAPGAVHLPQPVSTRSQHTQPTPEPSTAPS

SEQ ID NO: 4065 - protein, 36 aa, synthetic construct
  REGION 1..36: note = TNR1B Linker (3-38)
TSPTRSMAPGAVHLPQPVSTRSQHTQPTPEPSTAPS

SEQ ID NO: 4066 - protein, 35 aa, synthetic construct
  REGION 1..35: note = TNR1B Linker (4-38)
SPTRSMAPGAVHLPQPVSTRSQHTQPTPEPSTAPS

SEQ ID NO: 4067 - protein, 34 aa, synthetic construct
  REGION 1..34: note = TNR1B Linker (5-38)
PTRSMAPGAVHLPQPVSTRSQHTQPTPEPSTAPS

SEQ ID NO: 4068 - protein, 33 aa, synthetic construct
  REGION 1..33: note = TNR1B Linker (6-38)
TRSMAPGAVHLPQPVSTRSQHTQPTPEPSTAPS

SEQ ID NO: 4069 - protein, 32 aa, synthetic construct
  REGION 1..32: note = TNR1B Linker (7-38)
RSMAPGAVHLPQPVSTRSQHTQPTPEPSTAPS

SEQ ID NO: 4070 - protein, 31 aa, synthetic construct
  REGION 1..31: note = TNR1B Linker (8-38)
SMAPGAVHLPQPVSTRSQHTQPTPEPSTAPS

SEQ ID NO: 4071 - protein, 30 aa, synthetic construct
  REGION 1..30: note = TNR1B Linker (9-38)
MAPGAVHLPQPVSTRSQHTQPTPEPSTAPS

SEQ ID NO: 4072 - protein, 29 aa, synthetic construct
  REGION 1..29: note = TNR1B Linker (10-38)
APGAVHLPQPVSTRSQHTQPTPEPSTAPS

SEQ ID NO: 4073 - protein, 28 aa, synthetic construct
  REGION 1..28: note = TNR1B Linker (11-38)
PGAVHLPQPVSTRSQHTQPTPEPSTAPS

SEQ ID NO: 4074 - protein, 27 aa, synthetic construct
  REGION 1..27: note = TNR1B Linker (12-38)
GAVHLPQPVSTRSQHTQPTPEPSTAPS

SEQ ID NO: 4075 - protein, 26 aa, synthetic construct
  REGION 1..26: note = TNR1B Linker (13-38)
AVHLPQPVSTRSQHTQPTPEPSTAPS

SEQ ID NO: 4076 - protein, 25 aa, synthetic construct
  REGION 1..25: note = TNR1B Linker (14-38)
VHLPQPVSTRSQHTQPTPEPSTAPS

SEQ ID NO: 4077 - protein, 24 aa, synthetic construct
  REGION 1..24: note = TNR1B Linker (15-38)
HLPQPVSTRSQHTQPTPEPSTAPS

SEQ ID NO: 4078 - protein, 23 aa, synthetic construct
  REGION 1..23: note = TNR1B Linker (16-38)
LPQPVSTRSQHTQPTPEPSTAPS

SEQ ID NO: 4079 - protein, 22 aa, synthetic construct
  REGION 1..22: note = TNR1B Linker (17-38)
PQPVSTRSQHTQPTPEPSTAPS

SEQ ID NO: 4080 - protein, 21 aa, synthetic construct
  REGION 1..21: note = TNR1B Linker (18-38)
QPVSTRSQHTQPTPEPSTAPS

SEQ ID NO: 4081 - protein, 20 aa, synthetic construct
  REGION 1..20: note = TNR1B Linker (19-38)
PVSTRSQHTQPTPEPSTAPS

SEQ ID NO: 4082 - protein, 19 aa, synthetic construct
  REGION 1..19: note = TNR1B Linker (20-38)
VSTRSQHTQPTPEPSTAPS

SEQ ID NO: 4083 - protein, 18 aa, synthetic construct
  REGION 1..18: note = TNR1B Linker (21-38)
STRSQHTQPTPEPSTAPS

SEQ ID NO: 4084 - protein, 17 aa, synthetic construct
  REGION 1..17: note = TNR1B Linker (22-38)
TRSQHTQPTPEPSTAPS

SEQ ID NO: 4085 - protein, 16 aa, synthetic construct
  REGION 1..16: note = TNR1B Linker (23-38)
RSQHTQPTPEPSTAPS

SEQ ID NO: 4086 - protein, 15 aa, synthetic construct
  REGION 1..15: note = TNR1B Linker (24-38)
SQHTQPTPEPSTAPS

SEQ ID NO: 4087 - protein, 14 aa, synthetic construct
  REGION 1..14: note = TNR1B Linker (25-38)
QHTQPTPEPSTAPS

SEQ ID NO: 4088 - protein, 13 aa, synthetic construct
  REGION 1..13: note = TNR1B Linker (26-38)
HTQPTPEPSTAPS

SEQ ID NO: 4089 - protein, 12 aa, synthetic construct
  REGION 1..12: note = TNR1B Linker (27-38)
TQPTPEPSTAPS

SEQ ID NO: 4090 - protein, 11 aa, synthetic construct
  REGION 1..11: note = TNR1B Linker (28-38)
QPTPEPSTAPS

SEQ ID NO: 4091 - protein, 10 aa, synthetic construct
  REGION 1..10: note = TNR1B Linker (29-38)
PTPEPSTAPS

SEQ ID NO: 4092 - protein, 9 aa, synthetic construct
  REGION 1..9: note = TNR1B Linker (30-38)
TPEPSTAPS

SEQ ID NO: 4093 - protein, 8 aa, synthetic construct
  REGION 1..8: note = TNR1B Linker (31-38)
PEPSTAPS

SEQ ID NO: 4094 - protein, 7 aa, synthetic construct
  REGION 1..7: note = TNR1B Linker (32-38)
EPSTAPS

SEQ ID NO: 4095 - protein, 6 aa, synthetic construct
  REGION 1..6: note = TNR1B Linker (33-38)
PSTAPS

SEQ ID NO: 4096 - protein, 5 aa, synthetic construct
  REGION 1..5: note = TNR1B Linker (34-38)
STAPS

SEQ ID NO: 4097 - protein, 37 aa, synthetic construct
  REGION 1..37: note = TNR1B Linker (1-37)
TSTSPTRSMAPGAVHLPQPVSTRSQHTQPTPEPSTAP

SEQ ID NO: 4098 - protein, 36 aa, synthetic construct
  REGION 1..36: note = TNR1B Linker (2-37)
STSPTRSMAPGAVHLPQPVSTRSQHTQPTPEPSTAP

SEQ ID NO: 4099 - protein, 35 aa, synthetic construct
  REGION 1..35: note = TNR1B Linker (3-37)
TSPTRSMAPGAVHLPQPVSTRSQHTQPTPEPSTAP

SEQ ID NO: 4100 - protein, 34 aa, synthetic construct
  REGION 1..34: note = TNR1B Linker (4-37)
SPTRSMAPGAVHLPQPVSTRSQHTQPTPEPSTAP

SEQ ID NO: 4101 - protein, 33 aa, synthetic construct
  REGION 1..33: note = TNR1B Linker (5-37)
PTRSMAPGAVHLPQPVSTRSQHTQPTPEPSTAP

SEQ ID NO: 4102 - protein, 32 aa, synthetic construct
  REGION 1..32: note = TNR1B Linker (6-37)
TRSMAPGAVHLPQPVSTRSQHTQPTPEPSTAP

SEQ ID NO: 4103 - protein, 31 aa, synthetic construct
  REGION 1..31: note = TNR1B Linker (7-37)
RSMAPGAVHLPQPVSTRSQHTQPTPEPSTAP

SEQ ID NO: 4104 - protein, 30 aa, synthetic construct
  REGION 1..30: note = TNR1B Linker (8-37)
SMAPGAVHLPQPVSTRSQHTQPTPEPSTAP

SEQ ID NO: 4105 - protein, 29 aa, synthetic construct
  REGION 1..29: note = TNR1B Linker (9-37)
MAPGAVHLPQPVSTRSQHTQPTPEPSTAP

SEQ ID NO: 4106 - protein, 28 aa, synthetic construct
  REGION 1..28: note = TNR1B Linker (10-37)
APGAVHLPQPVSTRSQHTQPTPEPSTAP

SEQ ID NO: 4107 - protein, 27 aa, synthetic construct
  REGION 1..27: note = TNR1B Linker (11-37)
PGAVHLPQPVSTRSQHTQPTPEPSTAP

SEQ ID NO: 4108 - protein, 26 aa, synthetic construct
  REGION 1..26: note = TNR1B Linker (12-37)
GAVHLPQPVSTRSQHTQPTPEPSTAP

SEQ ID NO: 4109 - protein, 25 aa, synthetic construct
  REGION 1..25: note = TNR1B Linker (13-37)
AVHLPQPVSTRSQHTQPTPEPSTAP

SEQ ID NO: 4110 - protein, 24 aa, synthetic construct
  REGION 1..24: note = TNR1B Linker (14-37)
VHLPQPVSTRSQHTQPTPEPSTAP

SEQ ID NO: 4111 - protein, 23 aa, synthetic construct
  REGION 1..23: note = TNR1B Linker (15-37)
HLPQPVSTRSQHTQPTPEPSTAP

SEQ ID NO: 4112 - protein, 22 aa, synthetic construct
  REGION 1..22: note = TNR1B Linker (16-37)
LPQPVSTRSQHTQPTPEPSTAP

SEQ ID NO: 4113 - protein, 21 aa, synthetic construct
  REGION 1..21: note = TNR1B Linker (17-37)
PQPVSTRSQHTQPTPEPSTAP

SEQ ID NO: 4114 - protein, 20 aa, synthetic construct
  REGION 1..20: note = TNR1B Linker (18-37)
QPVSTRSQHTQPTPEPSTAP

SEQ ID NO: 4115 - protein, 19 aa, synthetic construct
  REGION 1..19: note = TNR1B Linker (19-37)
PVSTRSQHTQPTPEPSTAP

SEQ ID NO: 4116 - protein, 18 aa, synthetic construct
  REGION 1..18: note = TNR1B Linker (20-37)
VSTRSQHTQPTPEPSTAP

SEQ ID NO: 4117 - protein, 17 aa, synthetic construct
  REGION 1..17: note = TNR1B Linker (21-37)
STRSQHTQPTPEPSTAP

SEQ ID NO: 4118 - protein, 16 aa, synthetic construct
  REGION 1..16: note = TNR1B Linker (22-37)
TRSQHTQPTPEPSTAP

SEQ ID NO: 4119 - protein, 15 aa, synthetic construct
  REGION 1..15: note = TNR1B Linker (23-37)
RSQHTQPTPEPSTAP

SEQ ID NO: 4120 - protein, 14 aa, synthetic construct
  REGION 1..14: note = TNR1B Linker (24-37)
SQHTQPTPEPSTAP

SEQ ID NO: 4121 - protein, 13 aa, synthetic construct
  REGION 1..13: note = TNR1B Linker (25-37)
QHTQPTPEPSTAP

SEQ ID NO: 4122 - protein, 12 aa, synthetic construct
  REGION 1..12: note = TNR1B Linker (26-37)
HTQPTPEPSTAP

SEQ ID NO: 4123 - protein, 11 aa, synthetic construct
  REGION 1..11: note = TNR1B Linker (27-37)
TQPTPEPSTAP

SEQ ID NO: 4124 - protein, 10 aa, synthetic construct
  REGION 1..10: note = TNR1B Linker (28-37)
QPTPEPSTAP

SEQ ID NO: 4125 - protein, 9 aa, synthetic construct
  REGION 1..9: note = TNR1B Linker (29-37)
PTPEPSTAP

SEQ ID NO: 4126 - protein, 8 aa, synthetic construct
  REGION 1..8: note = TNR1B Linker (30-37)
TPEPSTAP

SEQ ID NO: 4127 - protein, 7 aa, synthetic construct
  REGION 1..7: note = TNR1B Linker (31-37)
PEPSTAP

SEQ ID NO: 4128 - protein, 6 aa, synthetic construct
  REGION 1..6: note = TNR1B Linker (32-37)
EPSTAP

SEQ ID NO: 4129 - protein, 5 aa, synthetic construct
  REGION 1..5: note = TNR1B Linker (33-37)
PSTAP

SEQ ID NO: 4130 - protein, 36 aa, synthetic construct
  REGION 1..36: note = TNR1B Linker (1-36)
TSTSPTRSMAPGAVHLPQPVSTRSQHTQPTPEPSTA

SEQ ID NO: 4131 - protein, 35 aa, synthetic construct
  REGION 1..35: note = TNR1B Linker (2-36)
STSPTRSMAPGAVHLPQPVSTRSQHTQPTPEPSTA

SEQ ID NO: 4132 - protein, 34 aa, synthetic construct
  REGION 1..34: note = TNR1B Linker (3-36)
TSPTRSMAPGAVHLPQPVSTRSQHTQPTPEPSTA

SEQ ID NO: 4133 - protein, 33 aa, synthetic construct
  REGION 1..33: note = TNR1B Linker (4-36)
SPTRSMAPGAVHLPQPVSTRSQHTQPTPEPSTA

SEQ ID NO: 4134 - protein, 32 aa, synthetic construct
  REGION 1..32: note = TNR1B Linker (5-36)
PTRSMAPGAVHLPQPVSTRSQHTQPTPEPSTA

SEQ ID NO: 4135 - protein, 31 aa, synthetic construct
  REGION 1..31: note = TNR1B Linker (6-36)
TRSMAPGAVHLPQPVSTRSQHTQPTPEPSTA

SEQ ID NO: 4136 - protein, 30 aa, synthetic construct
  REGION 1..30: note = TNR1B Linker (7-36)
RSMAPGAVHLPQPVSTRSQHTQPTPEPSTA

SEQ ID NO: 4137 - protein, 29 aa, synthetic construct
  REGION 1..29: note = TNR1B Linker (8-36)
SMAPGAVHLPQPVSTRSQHTQPTPEPSTA

SEQ ID NO: 4138 - protein, 28 aa, synthetic construct
  REGION 1..28: note = TNR1B Linker (9-36)
MAPGAVHLPQPVSTRSQHTQPTPEPSTA

SEQ ID NO: 4139 - protein, 27 aa, synthetic construct
  REGION 1..27: note = TNR1B Linker (10-36)
APGAVHLPQPVSTRSQHTQPTPEPSTA

SEQ ID NO: 4140 - protein, 26 aa, synthetic construct
  REGION 1..26: note = TNR1B Linker (11-36)
PGAVHLPQPVSTRSQHTQPTPEPSTA

SEQ ID NO: 4141 - protein, 25 aa, synthetic construct
  REGION 1..25: note = TNR1B Linker (12-36)
GAVHLPQPVSTRSQHTQPTPEPSTA

SEQ ID NO: 4142 - protein, 24 aa, synthetic construct
  REGION 1..24: note = TNR1B Linker (13-36)
AVHLPQPVSTRSQHTQPTPEPSTA

SEQ ID NO: 4143 - protein, 23 aa, synthetic construct
  REGION 1..23: note = TNR1B Linker (14-36)
VHLPQPVSTRSQHTQPTPEPSTA

SEQ ID NO: 4144 - protein, 22 aa, synthetic construct
  REGION 1..22: note = TNR1B Linker (15-36)
HLPQPVSTRSQHTQPTPEPSTA

SEQ ID NO: 4145 - protein, 21 aa, synthetic construct
  REGION 1..21: note = TNR1B Linker (16-36)
LPQPVSTRSQHTQPTPEPSTA

SEQ ID NO: 4146 - protein, 20 aa, synthetic construct
  REGION 1..20: note = TNR1B Linker (17-36)
PQPVSTRSQHTQPTPEPSTA

SEQ ID NO: 4147 - protein, 19 aa, synthetic construct
  REGION 1..19: note = TNR1B Linker (18-36)
QPVSTRSQHTQPTPEPSTA

SEQ ID NO: 4148 - protein, 18 aa, synthetic construct
  REGION 1..18: note = TNR1B Linker (19-36)
PVSTRSQHTQPTPEPSTA

SEQ ID NO: 4149 - protein, 17 aa, synthetic construct
  REGION 1..17: note = TNR1B Linker (20-36)
VSTRSQHTQPTPEPSTA

SEQ ID NO: 4150 - protein, 16 aa, synthetic construct
  REGION 1..16: note = TNR1B Linker (21-36)
STRSQHTQPTPEPSTA

SEQ ID NO: 4151 - protein, 15 aa, synthetic construct
  REGION 1..15: note = TNR1B Linker (22-36)
TRSQHTQPTPEPSTA

SEQ ID NO: 4152 - protein, 14 aa, synthetic construct
  REGION 1..14: note = TNR1B Linker (23-36)
RSQHTQPTPEPSTA

SEQ ID NO: 4153 - protein, 13 aa, synthetic construct
  REGION 1..13: note = TNR1B Linker (24-36)
SQHTQPTPEPSTA

SEQ ID NO: 4154 - protein, 12 aa, synthetic construct
  REGION 1..12: note = TNR1B Linker (25-36)
QHTQPTPEPSTA

SEQ ID NO: 4155 - protein, 11 aa, synthetic construct
  REGION 1..11: note = TNR1B Linker (26-36)
HTQPTPEPSTA

SEQ ID NO: 4156 - protein, 10 aa, synthetic construct
  REGION 1..10: note = TNR1B Linker (27-36)
TQPTPEPSTA

SEQ ID NO: 4157 - protein, 9 aa, synthetic construct
  REGION 1..9: note = TNR1B Linker (28-36)
QPTPEPSTA

SEQ ID NO: 4158 - protein, 8 aa, synthetic construct
  REGION 1..8: note = TNR1B Linker (29-36)
PTPEPSTA

SEQ ID NO: 4159 - protein, 7 aa, synthetic construct
  REGION 1..7: note = TNR1B Linker (30-36)
TPEPSTA

SEQ ID NO: 4160 - protein, 6 aa, synthetic construct
  REGION 1..6: note = TNR1B Linker (31-36)
PEPSTA

SEQ ID NO: 4161 - protein, 5 aa, synthetic construct
  REGION 1..5: note = TNR1B Linker (32-36)
EPSTA

SEQ ID NO: 4162 - protein, 35 aa, synthetic construct
  REGION 1..35: note = TNR1B Linker (1-35)
TSTSPTRSMAPGAVHLPQPVSTRSQHTQPTPEPST

SEQ ID NO: 4163 - protein, 34 aa, synthetic construct
  REGION 1..34: note = TNR1B Linker (2-35)
STSPTRSMAPGAVHLPQPVSTRSQHTQPTPEPST

SEQ ID NO: 4164 - protein, 33 aa, synthetic construct
  REGION 1..33: note = TNR1B Linker (3-35)
TSPTRSMAPGAVHLPQPVSTRSQHTQPTPEPST

SEQ ID NO: 4165 - protein, 32 aa, synthetic construct
  REGION 1..32: note = TNR1B Linker (4-35)
SPTRSMAPGAVHLPQPVSTRSQHTQPTPEPST

SEQ ID NO: 4166 - protein, 31 aa, synthetic construct
  REGION 1..31: note = TNR1B Linker (5-35)
PTRSMAPGAVHLPQPVSTRSQHTQPTPEPST

SEQ ID NO: 4167 - protein, 30 aa, synthetic construct
  REGION 1..30: note = TNR1B Linker (6-35)
TRSMAPGAVHLPQPVSTRSQHTQPTPEPST

SEQ ID NO: 4168 - protein, 29 aa, synthetic construct
  REGION 1..29: note = TNR1B Linker (7-35)
RSMAPGAVHLPQPVSTRSQHTQPTPEPST

SEQ ID NO: 4169 - protein, 28 aa, synthetic construct
  REGION 1..28: note = TNR1B Linker (8-35)
SMAPGAVHLPQPVSTRSQHTQPTPEPST

SEQ ID NO: 4170 - protein, 27 aa, synthetic construct
  REGION 1..27: note = TNR1B Linker (9-35)
MAPGAVHLPQPVSTRSQHTQPTPEPST

SEQ ID NO: 4171 - protein, 26 aa, synthetic construct
  REGION 1..26: note = TNR1B Linker (10-35)
APGAVHLPQPVSTRSQHTQPTPEPST

SEQ ID NO: 4172 - protein, 25 aa, synthetic construct
  REGION 1..25: note = TNR1B Linker (11-35)
PGAVHLPQPVSTRSQHTQPTPEPST

SEQ ID NO: 4173 - protein, 24 aa, synthetic construct
  REGION 1..24: note = TNR1B Linker (12-35)
GAVHLPQPVSTRSQHTQPTPEPST

SEQ ID NO: 4174 - protein, 23 aa, synthetic construct
  REGION 1..23: note = TNR1B Linker (13-35)
AVHLPQPVSTRSQHTQPTPEPST

SEQ ID NO: 4175 - protein, 22 aa, synthetic construct
  REGION 1..22: note = TNR1B Linker (14-35)
VHLPQPVSTRSQHTQPTPEPST

SEQ ID NO: 4176 - protein, 21 aa, synthetic construct
  REGION 1..21: note = TNR1B Linker (15-35)
HLPQPVSTRSQHTQPTPEPST

SEQ ID NO: 4177 - protein, 20 aa, synthetic construct
  REGION 1..20: note = TNR1B Linker (16-35)
LPQPVSTRSQHTQPTPEPST

SEQ ID NO: 4178 - protein, 19 aa, synthetic construct
  REGION 1..19: note = TNR1B Linker (17-35)
PQPVSTRSQHTQPTPEPST

SEQ ID NO: 4179 - protein, 18 aa, synthetic construct
  REGION 1..18: note = TNR1B Linker (18-35)
QPVSTRSQHTQPTPEPST

SEQ ID NO: 4180 - protein, 17 aa, synthetic construct
  REGION 1..17: note = TNR1B Linker (19-35)
PVSTRSQHTQPTPEPST

SEQ ID NO: 4181 - protein, 16 aa, synthetic construct
  REGION 1..16: note = TNR1B Linker (20-35)
VSTRSQHTQPTPEPST

SEQ ID NO: 4182 - protein, 15 aa, synthetic construct
  REGION 1..15: note = TNR1B Linker (21-35)
STRSQHTQPTPEPST

SEQ ID NO: 4183 - protein, 14 aa, synthetic construct
  REGION 1..14: note = TNR1B Linker (22-35)
TRSQHTQPTPEPST

SEQ ID NO: 4184 - protein, 13 aa, synthetic construct
  REGION 1..13: note = TNR1B Linker (23-35)
RSQHTQPTPEPST

SEQ ID NO: 4185 - protein, 12 aa, synthetic construct
  REGION 1..12: note = TNR1B Linker (24-35)
SQHTQPTPEPST

SEQ ID NO: 4186 - protein, 11 aa, synthetic construct
  REGION 1..11: note = TNR1B Linker (25-35)
QHTQPTPEPST

SEQ ID NO: 4187 - protein, 10 aa, synthetic construct
  REGION 1..10: note = TNR1B Linker (26-35)
HTQPTPEPST

SEQ ID NO: 4188 - protein, 9 aa, synthetic construct
  REGION 1..9: note = TNR1B Linker (27-35)
TQPTPEPST

SEQ ID NO: 4189 - protein, 8 aa, synthetic construct
  REGION 1..8: note = TNR1B Linker (28-35)
QPTPEPST

SEQ ID NO: 4190 - protein, 7 aa, synthetic construct
  REGION 1..7: note = TNR1B Linker (29-35)
PTPEPST

SEQ ID NO: 4191 - protein, 6 aa, synthetic construct
  REGION 1..6: note = TNR1B Linker (30-35)
TPEPST

SEQ ID NO: 4192 - protein, 5 aa, synthetic construct
  REGION 1..5: note = TNR1B Linker (31-35)
PEPST

SEQ ID NO: 4193 - protein, 34 aa, synthetic construct
  REGION 1..34: note = TNR1B Linker (1-34)
TSTSPTRSMAPGAVHLPQPVSTRSQHTQPTPEPS

SEQ ID NO: 4194 - protein, 33 aa, synthetic construct
  REGION 1..33: note = TNR1B Linker (2-34)
STSPTRSMAPGAVHLPQPVSTRSQHTQPTPEPS

SEQ ID NO: 4195 - protein, 32 aa, synthetic construct
  REGION 1..32: note = TNR1B Linker (3-34)
TSPTRSMAPGAVHLPQPVSTRSQHTQPTPEPS

SEQ ID NO: 4196 - protein, 31 aa, synthetic construct
  REGION 1..31: note = TNR1B Linker (4-34)
SPTRSMAPGAVHLPQPVSTRSQHTQPTPEPS

SEQ ID NO: 4197 - protein, 30 aa, synthetic construct
  REGION 1..30: note = TNR1B Linker (5-34)
PTRSMAPGAVHLPQPVSTRSQHTQPTPEPS

SEQ ID NO: 4198 - protein, 29 aa, synthetic construct
  REGION 1..29: note = TNR1B Linker (6-34)
TRSMAPGAVHLPQPVSTRSQHTQPTPEPS

SEQ ID NO: 4199 - protein, 28 aa, synthetic construct
  REGION 1..28: note = TNR1B Linker (7-34)
RSMAPGAVHLPQPVSTRSQHTQPTPEPS

SEQ ID NO: 4200 - protein, 27 aa, synthetic construct
  REGION 1..27: note = TNR1B Linker (8-34)
SMAPGAVHLPQPVSTRSQHTQPTPEPS

SEQ ID NO: 4201 - protein, 26 aa, synthetic construct
  REGION 1..26: note = TNR1B Linker (9-34)
MAPGAVHLPQPVSTRSQHTQPTPEPS

SEQ ID NO: 4202 - protein, 25 aa, synthetic construct
  REGION 1..25: note = TNR1B Linker (10-34)
APGAVHLPQPVSTRSQHTQPTPEPS

SEQ ID NO: 4203 - protein, 24 aa, synthetic construct
  REGION 1..24: note = TNR1B Linker (11-34)
PGAVHLPQPVSTRSQHTQPTPEPS

SEQ ID NO: 4204 - protein, 23 aa, synthetic construct
  REGION 1..23: note = TNR1B Linker (12-34)
GAVHLPQPVSTRSQHTQPTPEPS

SEQ ID NO: 4205 - protein, 22 aa, synthetic construct
  REGION 1..22: note = TNR1B Linker (13-34)
AVHLPQPVSTRSQHTQPTPEPS

SEQ ID NO: 4206 - protein, 21 aa, synthetic construct
  REGION 1..21: note = TNR1B Linker (14-34)
VHLPQPVSTRSQHTQPTPEPS

SEQ ID NO: 4207 - protein, 20 aa, synthetic construct
  REGION 1..20: note = TNR1B Linker (15-34)
HLPQPVSTRSQHTQPTPEPS

SEQ ID NO: 4208 - protein, 19 aa, synthetic construct
  REGION 1..19: note = TNR1B Linker (16-34)
LPQPVSTRSQHTQPTPEPS

SEQ ID NO: 4209 - protein, 18 aa, synthetic construct
  REGION 1..18: note = TNR1B Linker (17-34)
PQPVSTRSQHTQPTPEPS

SEQ ID NO: 4210 - protein, 17 aa, synthetic construct
  REGION 1..17: note = TNR1B Linker (18-34)
QPVSTRSQHTQPTPEPS

SEQ ID NO: 4211 - protein, 16 aa, synthetic construct
  REGION 1..16: note = TNR1B Linker (19-34)
PVSTRSQHTQPTPEPS

SEQ ID NO: 4212 - protein, 15 aa, synthetic construct
  REGION 1..15: note = TNR1B Linker (20-34)
VSTRSQHTQPTPEPS

SEQ ID NO: 4213 - protein, 14 aa, synthetic construct
  REGION 1..14: note = TNR1B Linker (21-34)
STRSQHTQPTPEPS

SEQ ID NO: 4214 - protein, 13 aa, synthetic construct
  REGION 1..13: note = TNR1B Linker (22-34)
TRSQHTQPTPEPS

SEQ ID NO: 4215 - protein, 12 aa, synthetic construct
  REGION 1..12: note = TNR1B Linker (23-34)
RSQHTQPTPEPS

SEQ ID NO: 4216 - protein, 11 aa, synthetic construct
  REGION 1..11: note = TNR1B Linker (24-34)
SQHTQPTPEPS

SEQ ID NO: 4217 - protein, 10 aa, synthetic construct
  REGION 1..10: note = TNR1B Linker (25-34)
QHTQPTPEPS

SEQ ID NO: 4218 - protein, 9 aa, synthetic construct
  REGION 1..9: note = TNR1B Linker (26-34)
HTQPTPEPS

SEQ ID NO: 4219 - protein, 8 aa, synthetic construct
  REGION 1..8: note = TNR1B Linker (27-34)
TQPTPEPS

SEQ ID NO: 4220 - protein, 7 aa, synthetic construct
  REGION 1..7: note = TNR1B Linker (28-34)
QPTPEPS

SEQ ID NO: 4221 - protein, 6 aa, synthetic construct
  REGION 1..6: note = TNR1B Linker (29-34)
PTPEPS

SEQ ID NO: 4222 - protein, 5 aa, synthetic construct
  REGION 1..5: note = TNR1B Linker (30-34)
TPEPS

SEQ ID NO: 4223 - protein, 33 aa, synthetic construct
  REGION 1..33: note = TNR1B Linker (1-33)
TSTSPTRSMAPGAVHLPQPVSTRSQHTQPTPEP

SEQ ID NO: 4224 - protein, 32 aa, synthetic construct
  REGION 1..32: note = TNR1B Linker (2-33)
STSPTRSMAPGAVHLPQPVSTRSQHTQPTPEP

SEQ ID NO: 4225 - protein, 31 aa, synthetic construct
  REGION 1..31: note = TNR1B Linker (3-33)
TSPTRSMAPGAVHLPQPVSTRSQHTQPTPEP

SEQ ID NO: 4226 - protein, 30 aa, synthetic construct
  REGION 1..30: note = TNR1B Linker (4-33)
SPTRSMAPGAVHLPQPVSTRSQHTQPTPEP

SEQ ID NO: 4227 - protein, 29 aa, synthetic construct
  REGION 1..29: note = TNR1B Linker (5-33)
PTRSMAPGAVHLPQPVSTRSQHTQPTPEP

SEQ ID NO: 4228 - protein, 28 aa, synthetic construct
  REGION 1..28: note = TNR1B Linker (6-33)
TRSMAPGAVHLPQPVSTRSQHTQPTPEP

SEQ ID NO: 4229 - protein, 27 aa, synthetic construct
  REGION 1..27: note = TNR1B Linker (7-33)
RSMAPGAVHLPQPVSTRSQHTQPTPEP

SEQ ID NO: 4230 - protein, 26 aa, synthetic construct
  REGION 1..26: note = TNR1B Linker (8-33)
SMAPGAVHLPQPVSTRSQHTQPTPEP

SEQ ID NO: 4231 - protein, 25 aa, synthetic construct
  REGION 1..25: note = TNR1B Linker (9-33)
MAPGAVHLPQPVSTRSQHTQPTPEP

SEQ ID NO: 4232 - protein, 24 aa, synthetic construct
  REGION 1..24: note = TNR1B Linker (10-33)
APGAVHLPQPVSTRSQHTQPTPEP

SEQ ID NO: 4233 - protein, 23 aa, synthetic construct
  REGION 1..23: note = TNR1B Linker (11-33)
PGAVHLPQPVSTRSQHTQPTPEP

SEQ ID NO: 4234 - protein, 22 aa, synthetic construct
  REGION 1..22: note = TNR1B Linker (12-33)
GAVHLPQPVSTRSQHTQPTPEP

SEQ ID NO: 4235 - protein, 21 aa, synthetic construct
  REGION 1..21: note = TNR1B Linker (13-33)
AVHLPQPVSTRSQHTQPTPEP

SEQ ID NO: 4236 - protein, 20 aa, synthetic construct
  REGION 1..20: note = TNR1B Linker (14-33)
VHLPQPVSTRSQHTQPTPEP

SEQ ID NO: 4237 - protein, 19 aa, synthetic construct
  REGION 1..19: note = TNR1B Linker (15-33)
HLPQPVSTRSQHTQPTPEP

SEQ ID NO: 4238 - protein, 18 aa, synthetic construct
  REGION 1..18: note = TNR1B Linker (16-33)
LPQPVSTRSQHTQPTPEP

SEQ ID NO: 4239 - protein, 17 aa, synthetic construct
  REGION 1..17: note = TNR1B Linker (17-33)
PQPVSTRSQHTQPTPEP

SEQ ID NO: 4240 - protein, 16 aa, synthetic construct
  REGION 1..16: note = TNR1B Linker (18-33)
QPVSTRSQHTQPTPEP

SEQ ID NO: 4241 - protein, 15 aa, synthetic construct
  REGION 1..15: note = TNR1B Linker (19-33)
PVSTRSQHTQPTPEP

SEQ ID NO: 4242 - protein, 14 aa, synthetic construct
  REGION 1..14: note = TNR1B Linker (20-33)
VSTRSQHTQPTPEP

SEQ ID NO: 4243 - protein, 13 aa, synthetic construct
  REGION 1..13: note = TNR1B Linker (21-33)
STRSQHTQPTPEP

SEQ ID NO: 4244 - protein, 12 aa, synthetic construct
  REGION 1..12: note = TNR1B Linker (22-33)
TRSQHTQPTPEP

SEQ ID NO: 4245 - protein, 11 aa, synthetic construct
  REGION 1..11: note = TNR1B Linker (23-33)
RSQHTQPTPEP

SEQ ID NO: 4246 - protein, 10 aa, synthetic construct
  REGION 1..10: note = TNR1B Linker (24-33)
SQHTQPTPEP

SEQ ID NO: 4247 - protein, 9 aa, synthetic construct
  REGION 1..9: note = TNR1B Linker (25-33)
QHTQPTPEP

SEQ ID NO: 4248 - protein, 8 aa, synthetic construct
  REGION 1..8: note = TNR1B Linker (26-33)
HTQPTPEP

SEQ ID NO: 4249 - protein, 7 aa, synthetic construct
  REGION 1..7: note = TNR1B Linker (27-33)
TQPTPEP

SEQ ID NO: 4250 - protein, 6 aa, synthetic construct
  REGION 1..6: note = TNR1B Linker (28-33)
QPTPEP

SEQ ID NO: 4251 - protein, 5 aa, synthetic construct
  REGION 1..5: note = TNR1B Linker (29-33)
PTPEP

SEQ ID NO: 4252 - protein, 32 aa, synthetic construct
  REGION 1..32: note = TNR1B Linker (1-32)
TSTSPTRSMAPGAVHLPQPVSTRSQHTQPTPE

SEQ ID NO: 4253 - protein, 31 aa, synthetic construct
  REGION 1..31: note = TNR1B Linker (2-32)
STSPTRSMAPGAVHLPQPVSTRSQHTQPTPE

SEQ ID NO: 4254 - protein, 30 aa, synthetic construct
  REGION 1..30: note = TNR1B Linker (3-32)
TSPTRSMAPGAVHLPQPVSTRSQHTQPTPE

SEQ ID NO: 4255 - protein, 29 aa, synthetic construct
  REGION 1..29: note = TNR1B Linker (4-32)
SPTRSMAPGAVHLPQPVSTRSQHTQPTPE

SEQ ID NO: 4256 - protein, 28 aa, synthetic construct
  REGION 1..28: note = TNR1B Linker (5-32)
PTRSMAPGAVHLPQPVSTRSQHTQPTPE

SEQ ID NO: 4257 - protein, 27 aa, synthetic construct
  REGION 1..27: note = TNR1B Linker (6-32)
TRSMAPGAVHLPQPVSTRSQHTQPTPE

SEQ ID NO: 4258 - protein, 26 aa, synthetic construct
  REGION 1..26: note = TNR1B Linker (7-32)
RSMAPGAVHLPQPVSTRSQHTQPTPE

SEQ ID NO: 4259 - protein, 25 aa, synthetic construct
  REGION 1..25: note = TNR1B Linker (8-32)
SMAPGAVHLPQPVSTRSQHTQPTPE

SEQ ID NO: 4260 - protein, 24 aa, synthetic construct
  REGION 1..24: note = TNR1B Linker (9-32)
MAPGAVHLPQPVSTRSQHTQPTPE

SEQ ID NO: 4261 - protein, 23 aa, synthetic construct
  REGION 1..23: note = TNR1B Linker (10-32)
APGAVHLPQPVSTRSQHTQPTPE

SEQ ID NO: 4262 - protein, 22 aa, synthetic construct
  REGION 1..22: note = TNR1B Linker (11-32)
PGAVHLPQPVSTRSQHTQPTPE

SEQ ID NO: 4263 - protein, 21 aa, synthetic construct
  REGION 1..21: note = TNR1B Linker (12-32)
GAVHLPQPVSTRSQHTQPTPE

SEQ ID NO: 4264 - protein, 20 aa, synthetic construct
  REGION 1..20: note = TNR1B Linker (13-32)
AVHLPQPVSTRSQHTQPTPE

SEQ ID NO: 4265 - protein, 19 aa, synthetic construct
  REGION 1..19: note = TNR1B Linker (14-32)
VHLPQPVSTRSQHTQPTPE

SEQ ID NO: 4266 - protein, 18 aa, synthetic construct
  REGION 1..18: note = TNR1B Linker (15-32)
HLPQPVSTRSQHTQPTPE

SEQ ID NO: 4267 - protein, 17 aa, synthetic construct
  REGION 1..17: note = TNR1B Linker (16-32)
LPQPVSTRSQHTQPTPE

SEQ ID NO: 4268 - protein, 16 aa, synthetic construct
  REGION 1..16: note = TNR1B Linker (17-32)
PQPVSTRSQHTQPTPE

SEQ ID NO: 4269 - protein, 15 aa, synthetic construct
  REGION 1..15: note = TNR1B Linker (18-32)
QPVSTRSQHTQPTPE

SEQ ID NO: 4270 - protein, 14 aa, synthetic construct
  REGION 1..14: note = TNR1B Linker (19-32)
PVSTRSQHTQPTPE

SEQ ID NO: 4271 - protein, 13 aa, synthetic construct
  REGION 1..13: note = TNR1B Linker (20-32)
VSTRSQHTQPTPE

SEQ ID NO: 4272 - protein, 12 aa, synthetic construct
  REGION 1..12: note = TNR1B Linker (21-32)
STRSQHTQPTPE

SEQ ID NO: 4273 - protein, 11 aa, synthetic construct
  REGION 1..11: note = TNR1B Linker (22-32)
TRSQHTQPTPE

SEQ ID NO: 4274 - protein, 10 aa, synthetic construct
  REGION 1..10: note = TNR1B Linker (23-32)
RSQHTQPTPE

SEQ ID NO: 4275 - protein, 9 aa, synthetic construct
  REGION 1..9: note = TNR1B Linker (24-32)
SQHTQPTPE

SEQ ID NO: 4276 - protein, 8 aa, synthetic construct
  REGION 1..8: note = TNR1B Linker (25-32)
QHTQPTPE

SEQ ID NO: 4277 - protein, 7 aa, synthetic construct
  REGION 1..7: note = TNR1B Linker (26-32)
HTQPTPE

SEQ ID NO: 4278 - protein, 6 aa, synthetic construct
  REGION 1..6: note = TNR1B Linker (27-32)
TQPTPE

SEQ ID NO: 4279 - protein, 5 aa, synthetic construct
  REGION 1..5: note = TNR1B Linker (28-32)
QPTPE

SEQ ID NO: 4280 - protein, 31 aa, synthetic construct
  REGION 1..31: note = TNR1B Linker (1-31)
TSTSPTRSMAPGAVHLPQPVSTRSQHTQPTP

SEQ ID NO: 4281 - protein, 30 aa, synthetic construct
  REGION 1..30: note = TNR1B Linker (2-31)
STSPTRSMAPGAVHLPQPVSTRSQHTQPTP

SEQ ID NO: 4282 - protein, 29 aa, synthetic construct
  REGION 1..29: note = TNR1B Linker (3-31)
TSPTRSMAPGAVHLPQPVSTRSQHTQPTP

SEQ ID NO: 4283 - protein, 28 aa, synthetic construct
  REGION 1..28: note = TNR1B Linker (4-31)
SPTRSMAPGAVHLPQPVSTRSQHTQPTP

SEQ ID NO: 4284 - protein, 27 aa, synthetic construct
  REGION 1..27: note = TNR1B Linker (5-31)
PTRSMAPGAVHLPQPVSTRSQHTQPTP

SEQ ID NO: 4285 - protein, 26 aa, synthetic construct
  REGION 1..26: note = TNR1B Linker (6-31)
TRSMAPGAVHLPQPVSTRSQHTQPTP

SEQ ID NO: 4286 - protein, 25 aa, synthetic construct
  REGION 1..25: note = TNR1B Linker (7-31)
RSMAPGAVHLPQPVSTRSQHTQPTP

SEQ ID NO: 4287 - protein, 24 aa, synthetic construct
  REGION 1..24: note = TNR1B Linker (8-31)
SMAPGAVHLPQPVSTRSQHTQPTP

SEQ ID NO: 4288 - protein, 23 aa, synthetic construct
  REGION 1..23: note = TNR1B Linker (9-31)
MAPGAVHLPQPVSTRSQHTQPTP

SEQ ID NO: 4289 - protein, 22 aa, synthetic construct
  REGION 1..22: note = TNR1B Linker (10-31)
APGAVHLPQPVSTRSQHTQPTP

SEQ ID NO: 4290 - protein, 21 aa, synthetic construct
  REGION 1..21: note = TNR1B Linker (11-31)
PGAVHLPQPVSTRSQHTQPTP

SEQ ID NO: 4291 - protein, 20 aa, synthetic construct
  REGION 1..20: note = TNR1B Linker (12-31)
GAVHLPQPVSTRSQHTQPTP

SEQ ID NO: 4292 - protein, 19 aa, synthetic construct
  REGION 1..19: note = TNR1B Linker (13-31)
AVHLPQPVSTRSQHTQPTP

SEQ ID NO: 4293 - protein, 18 aa, synthetic construct
  REGION 1..18: note = TNR1B Linker (14-31)
VHLPQPVSTRSQHTQPTP

SEQ ID NO: 4294 - protein, 17 aa, synthetic construct
  REGION 1..17: note = TNR1B Linker (15-31)
HLPQPVSTRSQHTQPTP

SEQ ID NO: 4295 - protein, 16 aa, synthetic construct
  REGION 1..16: note = TNR1B Linker (16-31)
LPQPVSTRSQHTQPTP

SEQ ID NO: 4296 - protein, 15 aa, synthetic construct
  REGION 1..15: note = TNR1B Linker (17-31)
PQPVSTRSQHTQPTP

SEQ ID NO: 4297 - protein, 14 aa, synthetic construct
  REGION 1..14: note = TNR1B Linker (18-31)
QPVSTRSQHTQPTP

SEQ ID NO: 4298 - protein, 13 aa, synthetic construct
  REGION 1..13: note = TNR1B Linker (19-31)
PVSTRSQHTQPTP

SEQ ID NO: 4299 - protein, 12 aa, synthetic construct
  REGION 1..12: note = TNR1B Linker (20-31)
VSTRSQHTQPTP

SEQ ID NO: 4300 - protein, 11 aa, synthetic construct
  REGION 1..11: note = TNR1B Linker (21-31)
STRSQHTQPTP

SEQ ID NO: 4301 - protein, 10 aa, synthetic construct
  REGION 1..10: note = TNR1B Linker (22-31)
TRSQHTQPTP

SEQ ID NO: 4302 - protein, 9 aa, synthetic construct
  REGION 1..9: note = TNR1B Linker (23-31)
RSQHTQPTP

SEQ ID NO: 4303 - protein, 8 aa, synthetic construct
  REGION 1..8: note = TNR1B Linker (24-31)
SQHTQPTP

SEQ ID NO: 4304 - protein, 7 aa, synthetic construct
  REGION 1..7: note = TNR1B Linker (25-31)
QHTQPTP

SEQ ID NO: 4305 - protein, 6 aa, synthetic construct
  REGION 1..6: note = TNR1B Linker (26-31)
HTQPTP

SEQ ID NO: 4306 - protein, 5 aa, synthetic construct
  REGION 1..5: note = TNR1B Linker (27-31)
TQPTP

SEQ ID NO: 4307 - protein, 30 aa, synthetic construct
  REGION 1..30: note = TNR1B Linker (1-30)
TSTSPTRSMAPGAVHLPQPVSTRSQHTQPT

SEQ ID NO: 4308 - protein, 29 aa, synthetic construct
  REGION 1..29: note = TNR1B Linker (2-30)
STSPTRSMAPGAVHLPQPVSTRSQHTQPT

SEQ ID NO: 4309 - protein, 28 aa, synthetic construct
  REGION 1..28: note = TNR1B Linker (3-30)
TSPTRSMAPGAVHLPQPVSTRSQHTQPT

SEQ ID NO: 4310 - protein, 27 aa, synthetic construct
  REGION 1..27: note = TNR1B Linker (4-30)
SPTRSMAPGAVHLPQPVSTRSQHTQPT

SEQ ID NO: 4311 - protein, 26 aa, synthetic construct
  REGION 1..26: note = TNR1B Linker (5-30)
PTRSMAPGAVHLPQPVSTRSQHTQPT

SEQ ID NO: 4312 - protein, 25 aa, synthetic construct
  REGION 1..25: note = TNR1B Linker (6-30)
TRSMAPGAVHLPQPVSTRSQHTQPT

SEQ ID NO: 4313 - protein, 24 aa, synthetic construct
  REGION 1..24: note = TNR1B Linker (7-30)
RSMAPGAVHLPQPVSTRSQHTQPT

SEQ ID NO: 4314 - protein, 23 aa, synthetic construct
  REGION 1..23: note = TNR1B Linker (8-30)
SMAPGAVHLPQPVSTRSQHTQPT

SEQ ID NO: 4315 - protein, 22 aa, synthetic construct
  REGION 1..22: note = TNR1B Linker (9-30)
MAPGAVHLPQPVSTRSQHTQPT

SEQ ID NO: 4316 - protein, 21 aa, synthetic construct
  REGION 1..21: note = TNR1B Linker (10-30)
APGAVHLPQPVSTRSQHTQPT

SEQ ID NO: 4317 - protein, 20 aa, synthetic construct
  REGION 1..20: note = TNR1B Linker (11-30)
PGAVHLPQPVSTRSQHTQPT

SEQ ID NO: 4318 - protein, 19 aa, synthetic construct
  REGION 1..19: note = TNR1B Linker (12-30)
GAVHLPQPVSTRSQHTQPT

SEQ ID NO: 4319 - protein, 18 aa, synthetic construct
  REGION 1..18: note = TNR1B Linker (13-30)
AVHLPQPVSTRSQHTQPT

SEQ ID NO: 4320 - protein, 17 aa, synthetic construct
  REGION 1..17: note = TNR1B Linker (14-30)
VHLPQPVSTRSQHTQPT

SEQ ID NO: 4321 - protein, 16 aa, synthetic construct
  REGION 1..16: note = TNR1B Linker (15-30)
HLPQPVSTRSQHTQPT

SEQ ID NO: 4322 - protein, 15 aa, synthetic construct
  REGION 1..15: note = TNR1B Linker (16-30)
LPQPVSTRSQHTQPT

SEQ ID NO: 4323 - protein, 14 aa, synthetic construct
  REGION 1..14: note = TNR1B Linker (17-30)
PQPVSTRSQHTQPT

SEQ ID NO: 4324 - protein, 13 aa, synthetic construct
  REGION 1..13: note = TNR1B Linker (18-30)
QPVSTRSQHTQPT

SEQ ID NO: 4325 - protein, 12 aa, synthetic construct
  REGION 1..12: note = TNR1B Linker (19-30)
PVSTRSQHTQPT

SEQ ID NO: 4326 - protein, 11 aa, synthetic construct
  REGION 1..11: note = TNR1B Linker (20-30)
VSTRSQHTQPT

SEQ ID NO: 4327 - protein, 10 aa, synthetic construct
  REGION 1..10: note = TNR1B Linker (21-30)
STRSQHTQPT

SEQ ID NO: 4328 - protein, 9 aa, synthetic construct
  REGION 1..9: note = TNR1B Linker (22-30)
TRSQHTQPT

SEQ ID NO: 4329 - protein, 8 aa, synthetic construct
  REGION 1..8: note = TNR1B Linker (23-30)
RSQHTQPT

SEQ ID NO: 4330 - protein, 7 aa, synthetic construct
  REGION 1..7: note = TNR1B Linker (24-30)
SQHTQPT

SEQ ID NO: 4331 - protein, 6 aa, synthetic construct
  REGION 1..6: note = TNR1B Linker (25-30)
QHTQPT

SEQ ID NO: 4332 - protein, 5 aa, synthetic construct
  REGION 1..5: note = TNR1B Linker (26-30)
HTQPT

SEQ ID NO: 4333 - protein, 29 aa, synthetic construct
  REGION 1..29: note = TNR1B Linker (1-29)
TSTSPTRSMAPGAVHLPQPVSTRSQHTQP

SEQ ID NO: 4334 - protein, 28 aa, synthetic construct
  REGION 1..28: note = TNR1B Linker (2-29)
STSPTRSMAPGAVHLPQPVSTRSQHTQP

SEQ ID NO: 4335 - protein, 27 aa, synthetic construct
  REGION 1..27: note = TNR1B Linker (3-29)
TSPTRSMAPGAVHLPQPVSTRSQHTQP

SEQ ID NO: 4336 - protein, 26 aa, synthetic construct
  REGION 1..26: note = TNR1B Linker (4-29)
SPTRSMAPGAVHLPQPVSTRSQHTQP

SEQ ID NO: 4337 - protein, 25 aa, synthetic construct
  REGION 1..25: note = TNR1B Linker (5-29)
PTRSMAPGAVHLPQPVSTRSQHTQP

SEQ ID NO: 4338 - protein, 24 aa, synthetic construct
  REGION 1..24: note = TNR1B Linker (6-29)
TRSMAPGAVHLPQPVSTRSQHTQP

SEQ ID NO: 4339 - protein, 23 aa, synthetic construct
  REGION 1..23: note = TNR1B Linker (7-29)
RSMAPGAVHLPQPVSTRSQHTQP

SEQ ID NO: 4340 - protein, 22 aa, synthetic construct
  REGION 1..22: note = TNR1B Linker (8-29)
SMAPGAVHLPQPVSTRSQHTQP

SEQ ID NO: 4341 - protein, 21 aa, synthetic construct
  REGION 1..21: note = TNR1B Linker (9-29)
MAPGAVHLPQPVSTRSQHTQP

SEQ ID NO: 4342 - protein, 20 aa, synthetic construct
  REGION 1..20: note = TNR1B Linker (10-29)
APGAVHLPQPVSTRSQHTQP

SEQ ID NO: 4343 - protein, 19 aa, synthetic construct
  REGION 1..19: note = TNR1B Linker (11-29)
PGAVHLPQPVSTRSQHTQP

SEQ ID NO: 4344 - protein, 18 aa, synthetic construct
  REGION 1..18: note = TNR1B Linker (12-29)
GAVHLPQPVSTRSQHTQP

SEQ ID NO: 4345 - protein, 17 aa, synthetic construct
  REGION 1..17: note = TNR1B Linker (13-29)
AVHLPQPVSTRSQHTQP

SEQ ID NO: 4346 - protein, 16 aa, synthetic construct
  REGION 1..16: note = TNR1B Linker (14-29)
VHLPQPVSTRSQHTQP

SEQ ID NO: 4347 - protein, 15 aa, synthetic construct
  REGION 1..15: note = TNR1B Linker (15-29)
HLPQPVSTRSQHTQP

SEQ ID NO: 4348 - protein, 14 aa, synthetic construct
  REGION 1..14: note = TNR1B Linker (16-29)
LPQPVSTRSQHTQP

SEQ ID NO: 4349 - protein, 13 aa, synthetic construct
  REGION 1..13: note = TNR1B Linker (17-29)
PQPVSTRSQHTQP

SEQ ID NO: 4350 - protein, 12 aa, synthetic construct
  REGION 1..12: note = TNR1B Linker (18-29)
QPVSTRSQHTQP

SEQ ID NO: 4351 - protein, 11 aa, synthetic construct
  REGION 1..11: note = TNR1B Linker (19-29)
PVSTRSQHTQP

SEQ ID NO: 4352 - protein, 10 aa, synthetic construct
  REGION 1..10: note = TNR1B Linker (20-29)
VSTRSQHTQP

SEQ ID NO: 4353 - protein, 9 aa, synthetic construct
  REGION 1..9: note = TNR1B Linker (21-29)
STRSQHTQP

SEQ ID NO: 4354 - protein, 8 aa, synthetic construct
  REGION 1..8: note = TNR1B Linker (22-29)
TRSQHTQP

SEQ ID NO: 4355 - protein, 7 aa, synthetic construct
  REGION 1..7: note = TNR1B Linker (23-29)
RSQHTQP

SEQ ID NO: 4356 - protein, 6 aa, synthetic construct
  REGION 1..6: note = TNR1B Linker (24-29)
SQHTQP

SEQ ID NO: 4357 - protein, 5 aa, synthetic construct
  REGION 1..5: note = TNR1B Linker (25-29)
QHTQP

SEQ ID NO: 4358 - protein, 28 aa, synthetic construct
  REGION 1..28: note = TNR1B Linker (1-28)
TSTSPTRSMAPGAVHLPQPVSTRSQHTQ

SEQ ID NO: 4359 - protein, 27 aa, synthetic construct
  REGION 1..27: note = TNR1B Linker (2-28)
STSPTRSMAPGAVHLPQPVSTRSQHTQ

SEQ ID NO: 4360 - protein, 26 aa, synthetic construct
  REGION 1..26: note = TNR1B Linker (3-28)
TSPTRSMAPGAVHLPQPVSTRSQHTQ

SEQ ID NO: 4361 - protein, 25 aa, synthetic construct
  REGION 1..25: note = TNR1B Linker (4-28)
SPTRSMAPGAVHLPQPVSTRSQHTQ

SEQ ID NO: 4362 - protein, 24 aa, synthetic construct
  REGION 1..24: note = TNR1B Linker (5-28)
PTRSMAPGAVHLPQPVSTRSQHTQ

SEQ ID NO: 4363 - protein, 23 aa, synthetic construct
  REGION 1..23: note = TNR1B Linker (6-28)
TRSMAPGAVHLPQPVSTRSQHTQ

SEQ ID NO: 4364 - protein, 22 aa, synthetic construct
  REGION 1..22: note = TNR1B Linker (7-28)
RSMAPGAVHLPQPVSTRSQHTQ

SEQ ID NO: 4365 - protein, 21 aa, synthetic construct
  REGION 1..21: note = TNR1B Linker (8-28)
SMAPGAVHLPQPVSTRSQHTQ

SEQ ID NO: 4366 - protein, 20 aa, synthetic construct
  REGION 1..20: note = TNR1B Linker (9-28)
MAPGAVHLPQPVSTRSQHTQ

SEQ ID NO: 4367 - protein, 19 aa, synthetic construct
  REGION 1..19: note = TNR1B Linker (10-28)
APGAVHLPQPVSTRSQHTQ

SEQ ID NO: 4368 - protein, 18 aa, synthetic construct
  REGION 1..18: note = TNR1B Linker (11-28)
PGAVHLPQPVSTRSQHTQ

SEQ ID NO: 4369 - protein, 17 aa, synthetic construct
  REGION 1..17: note = TNR1B Linker (12-28)
GAVHLPQPVSTRSQHTQ

SEQ ID NO: 4370 - protein, 16 aa, synthetic construct
  REGION 1..16: note = TNR1B Linker (13-28)
AVHLPQPVSTRSQHTQ

SEQ ID NO: 4371 - protein, 15 aa, synthetic construct
  REGION 1..15: note = TNR1B Linker (14-28)
VHLPQPVSTRSQHTQ

SEQ ID NO: 4372 - protein, 14 aa, synthetic construct
  REGION 1..14: note = TNR1B Linker (15-28)
HLPQPVSTRSQHTQ

SEQ ID NO: 4373 - protein, 13 aa, synthetic construct
  REGION 1..13: note = TNR1B Linker (16-28)
LPQPVSTRSQHTQ

SEQ ID NO: 4374 - protein, 12 aa, synthetic construct
  REGION 1..12: note = TNR1B Linker (17-28)
PQPVSTRSQHTQ

SEQ ID NO: 4375 - protein, 11 aa, synthetic construct
  REGION 1..11: note = TNR1B Linker (18-28)
QPVSTRSQHTQ

SEQ ID NO: 4376 - protein, 10 aa, synthetic construct
  REGION 1..10: note = TNR1B Linker (19-28)
PVSTRSQHTQ

SEQ ID NO: 4377 - protein, 9 aa, synthetic construct
  REGION 1..9: note = TNR1B Linker (20-28)
VSTRSQHTQ

SEQ ID NO: 4378 - protein, 8 aa, synthetic construct
  REGION 1..8: note = TNR1B Linker (21-28)
STRSQHTQ

SEQ ID NO: 4379 - protein, 7 aa, synthetic construct
  REGION 1..7: note = TNR1B Linker (22-28)
TRSQHTQ

SEQ ID NO: 4380 - protein, 6 aa, synthetic construct
  REGION 1..6: note = TNR1B Linker (23-28)
RSQHTQ

SEQ ID NO: 4381 - protein, 5 aa, synthetic construct
  REGION 1..5: note = TNR1B Linker (24-28)
SQHTQ

SEQ ID NO: 4382 - protein, 27 aa, synthetic construct
  REGION 1..27: note = TNR1B Linker (1-27)
TSTSPTRSMAPGAVHLPQPVSTRSQHT

SEQ ID NO: 4383 - protein, 26 aa, synthetic construct
  REGION 1..26: note = TNR1B Linker (2-27)
STSPTRSMAPGAVHLPQPVSTRSQHT

SEQ ID NO: 4384 - protein, 25 aa, synthetic construct
  REGION 1..25: note = TNR1B Linker (3-27)
TSPTRSMAPGAVHLPQPVSTRSQHT

SEQ ID NO: 4385 - protein, 24 aa, synthetic construct
  REGION 1..24: note = TNR1B Linker (4-27)
SPTRSMAPGAVHLPQPVSTRSQHT

SEQ ID NO: 4386 - protein, 23 aa, synthetic construct
  REGION 1..23: note = TNR1B Linker (5-27)
PTRSMAPGAVHLPQPVSTRSQHT

SEQ ID NO: 4387 - protein, 22 aa, synthetic construct
  REGION 1..22: note = TNR1B Linker (6-27)
TRSMAPGAVHLPQPVSTRSQHT

SEQ ID NO: 4388 - protein, 21 aa, synthetic construct
  REGION 1..21: note = TNR1B Linker (7-27)
RSMAPGAVHLPQPVSTRSQHT

SEQ ID NO: 4389 - protein, 20 aa, synthetic construct
  REGION 1..20: note = TNR1B Linker (8-27)
SMAPGAVHLPQPVSTRSQHT

SEQ ID NO: 4390 - protein, 19 aa, synthetic construct
  REGION 1..19: note = TNR1B Linker (9-27)
MAPGAVHLPQPVSTRSQHT

SEQ ID NO: 4391 - protein, 18 aa, synthetic construct
  REGION 1..18: note = TNR1B Linker (10-27)
APGAVHLPQPVSTRSQHT

SEQ ID NO: 4392 - protein, 17 aa, synthetic construct
  REGION 1..17: note = TNR1B Linker (11-27)
PGAVHLPQPVSTRSQHT

SEQ ID NO: 4393 - protein, 16 aa, synthetic construct
  REGION 1..16: note = TNR1B Linker (12-27)
GAVHLPQPVSTRSQHT

SEQ ID NO: 4394 - protein, 15 aa, synthetic construct
  REGION 1..15: note = TNR1B Linker (13-27)
AVHLPQPVSTRSQHT

SEQ ID NO: 4395 - protein, 14 aa, synthetic construct
  REGION 1..14: note = TNR1B Linker (14-27)
VHLPQPVSTRSQHT

SEQ ID NO: 4396 - protein, 13 aa, synthetic construct
  REGION 1..13: note = TNR1B Linker (15-27)
HLPQPVSTRSQHT

SEQ ID NO: 4397 - protein, 12 aa, synthetic construct
  REGION 1..12: note = TNR1B Linker (16-27)
LPQPVSTRSQHT

SEQ ID NO: 4398 - protein, 11 aa, synthetic construct
  REGION 1..11: note = TNR1B Linker (17-27)
PQPVSTRSQHT

SEQ ID NO: 4399 - protein, 10 aa, synthetic construct
  REGION 1..10: note = TNR1B Linker (18-27)
QPVSTRSQHT

SEQ ID NO: 4400 - protein, 9 aa, synthetic construct
  REGION 1..9: note = TNR1B Linker (19-27)
PVSTRSQHT

SEQ ID NO: 4401 - protein, 8 aa, synthetic construct
  REGION 1..8: note = TNR1B Linker (20-27)
VSTRSQHT

SEQ ID NO: 4402 - protein, 7 aa, synthetic construct
  REGION 1..7: note = TNR1B Linker (21-27)
STRSQHT

SEQ ID NO: 4403 - protein, 6 aa, synthetic construct
  REGION 1..6: note = TNR1B Linker (22-27)
TRSQHT

SEQ ID NO: 4404 - protein, 5 aa, synthetic construct
  REGION 1..5: note = TNR1B Linker (23-27)
RSQHT

SEQ ID NO: 4405 - protein, 26 aa, synthetic construct
  REGION 1..26: note = TNR1B Linker (1-26)
TSTSPTRSMAPGAVHLPQPVSTRSQH

SEQ ID NO: 4406 - protein, 25 aa, synthetic construct
  REGION 1..25: note = TNR1B Linker (2-26)
STSPTRSMAPGAVHLPQPVSTRSQH

SEQ ID NO: 4407 - protein, 24 aa, synthetic construct
  REGION 1..24: note = TNR1B Linker (3-26)
TSPTRSMAPGAVHLPQPVSTRSQH

SEQ ID NO: 4408 - protein, 23 aa, synthetic construct
  REGION 1..23: note = TNR1B Linker (4-26)
SPTRSMAPGAVHLPQPVSTRSQH

SEQ ID NO: 4409 - protein, 22 aa, synthetic construct
  REGION 1..22: note = TNR1B Linker (5-26)
PTRSMAPGAVHLPQPVSTRSQH

SEQ ID NO: 4410 - protein, 21 aa, synthetic construct
  REGION 1..21: note = TNR1B Linker (6-26)
TRSMAPGAVHLPQPVSTRSQH

SEQ ID NO: 4411 - protein, 20 aa, synthetic construct
  REGION 1..20: note = TNR1B Linker (7-26)
RSMAPGAVHLPQPVSTRSQH

SEQ ID NO: 4412 - protein, 19 aa, synthetic construct
  REGION 1..19: note = TNR1B Linker (8-26)
SMAPGAVHLPQPVSTRSQH

SEQ ID NO: 4413 - protein, 18 aa, synthetic construct
  REGION 1..18: note = TNR1B Linker (9-26)
MAPGAVHLPQPVSTRSQH

SEQ ID NO: 4414 - protein, 17 aa, synthetic construct
  REGION 1..17: note = TNR1B Linker (10-26)
APGAVHLPQPVSTRSQH

SEQ ID NO: 4415 - protein, 16 aa, synthetic construct
  REGION 1..16: note = TNR1B Linker (11-26)
PGAVHLPQPVSTRSQH

SEQ ID NO: 4416 - protein, 15 aa, synthetic construct
  REGION 1..15: note = TNR1B Linker (12-26)
GAVHLPQPVSTRSQH

SEQ ID NO: 4417 - protein, 14 aa, synthetic construct
  REGION 1..14: note = TNR1B Linker (13-26)
AVHLPQPVSTRSQH

SEQ ID NO: 4418 - protein, 13 aa, synthetic construct
  REGION 1..13: note = TNR1B Linker (14-26)
VHLPQPVSTRSQH

SEQ ID NO: 4419 - protein, 12 aa, synthetic construct
  REGION 1..12: note = TNR1B Linker (15-26)
HLPQPVSTRSQH

SEQ ID NO: 4420 - protein, 11 aa, synthetic construct
  REGION 1..11: note = TNR1B Linker (16-26)
LPQPVSTRSQH

SEQ ID NO: 4421 - protein, 10 aa, synthetic construct
  REGION 1..10: note = TNR1B Linker (17-26)
PQPVSTRSQH

SEQ ID NO: 4422 - protein, 9 aa, synthetic construct
  REGION 1..9: note = TNR1B Linker (18-26)
QPVSTRSQH

SEQ ID NO: 4423 - protein, 8 aa, synthetic construct
  REGION 1..8: note = TNR1B Linker (19-26)
PVSTRSQH

SEQ ID NO: 4424 - protein, 7 aa, synthetic construct
  REGION 1..7: note = TNR1B Linker (20-26)
VSTRSQH

SEQ ID NO: 4425 - protein, 6 aa, synthetic construct
  REGION 1..6: note = TNR1B Linker (21-26)
STRSQH

SEQ ID NO: 4426 - protein, 5 aa, synthetic construct
  REGION 1..5: note = TNR1B Linker (22-26)
TRSQH

SEQ ID NO: 4427 - protein, 25 aa, synthetic construct
  REGION 1..25: note = TNR1B Linker (1-25)
TSTSPTRSMAPGAVHLPQPVSTRSQ

SEQ ID NO: 4428 - protein, 24 aa, synthetic construct
  REGION 1..24: note = TNR1B Linker (2-25)
STSPTRSMAPGAVHLPQPVSTRSQ

SEQ ID NO: 4429 - protein, 23 aa, synthetic construct
  REGION 1..23: note = TNR1B Linker (3-25)
TSPTRSMAPGAVHLPQPVSTRSQ

SEQ ID NO: 4430 - protein, 22 aa, synthetic construct
  REGION 1..22: note = TNR1B Linker (4-25)
SPTRSMAPGAVHLPQPVSTRSQ

SEQ ID NO: 4431 - protein, 21 aa, synthetic construct
  REGION 1..21: note = TNR1B Linker (5-25)
PTRSMAPGAVHLPQPVSTRSQ

SEQ ID NO: 4432 - protein, 20 aa, synthetic construct
  REGION 1..20: note = TNR1B Linker (6-25)
TRSMAPGAVHLPQPVSTRSQ

SEQ ID NO: 4433 - protein, 19 aa, synthetic construct
  REGION 1..19: note = TNR1B Linker (7-25)
RSMAPGAVHLPQPVSTRSQ

SEQ ID NO: 4434 - protein, 18 aa, synthetic construct
  REGION 1..18: note = TNR1B Linker (8-25)
SMAPGAVHLPQPVSTRSQ

SEQ ID NO: 4435 - protein, 17 aa, synthetic construct
  REGION 1..17: note = TNR1B Linker (9-25)
MAPGAVHLPQPVSTRSQ

SEQ ID NO: 4436 - protein, 16 aa, synthetic construct
  REGION 1..16: note = TNR1B Linker (10-25)
APGAVHLPQPVSTRSQ

SEQ ID NO: 4437 - protein, 15 aa, synthetic construct
  REGION 1..15: note = TNR1B Linker (11-25)
PGAVHLPQPVSTRSQ

SEQ ID NO: 4438 - protein, 14 aa, synthetic construct
  REGION 1..14: note = TNR1B Linker (12-25)
GAVHLPQPVSTRSQ

SEQ ID NO: 4439 - protein, 13 aa, synthetic construct
  REGION 1..13: note = TNR1B Linker (13-25)
AVHLPQPVSTRSQ

SEQ ID NO: 4440 - protein, 12 aa, synthetic construct
  REGION 1..12: note = TNR1B Linker (14-25)
VHLPQPVSTRSQ

SEQ ID NO: 4441 - protein, 11 aa, synthetic construct
  REGION 1..11: note = TNR1B Linker (15-25)
HLPQPVSTRSQ

SEQ ID NO: 4442 - protein, 10 aa, synthetic construct
  REGION 1..10: note = TNR1B Linker (16-25)
LPQPVSTRSQ

SEQ ID NO: 4443 - protein, 9 aa, synthetic construct
  REGION 1..9: note = TNR1B Linker (17-25)
PQPVSTRSQ

SEQ ID NO: 4444 - protein, 8 aa, synthetic construct
  REGION 1..8: note = TNR1B Linker (18-25)
QPVSTRSQ

SEQ ID NO: 4445 - protein, 7 aa, synthetic construct
  REGION 1..7: note = TNR1B Linker (19-25)
PVSTRSQ

SEQ ID NO: 4446 - protein, 6 aa, synthetic construct
  REGION 1..6: note = TNR1B Linker (20-25)
VSTRSQ

SEQ ID NO: 4447 - protein, 5 aa, synthetic construct
  REGION 1..5: note = TNR1B Linker (21-25)
STRSQ

SEQ ID NO: 4448 - protein, 24 aa, synthetic construct
  REGION 1..24: note = TNR1B Linker (1-24)
TSTSPTRSMAPGAVHLPQPVSTRS

SEQ ID NO: 4449 - protein, 23 aa, synthetic construct
  REGION 1..23: note = TNR1B Linker (2-24)
STSPTRSMAPGAVHLPQPVSTRS

SEQ ID NO: 4450 - protein, 22 aa, synthetic construct
  REGION 1..22: note = TNR1B Linker (3-24)
TSPTRSMAPGAVHLPQPVSTRS

SEQ ID NO: 4451 - protein, 21 aa, synthetic construct
  REGION 1..21: note = TNR1B Linker (4-24)
SPTRSMAPGAVHLPQPVSTRS

SEQ ID NO: 4452 - protein, 20 aa, synthetic construct
  REGION 1..20: note = TNR1B Linker (5-24)
PTRSMAPGAVHLPQPVSTRS

SEQ ID NO: 4453 - protein, 19 aa, synthetic construct
  REGION 1..19: note = TNR1B Linker (6-24)
TRSMAPGAVHLPQPVSTRS

SEQ ID NO: 4454 - protein, 18 aa, synthetic construct
  REGION 1..18: note = TNR1B Linker (7-24)
RSMAPGAVHLPQPVSTRS

SEQ ID NO: 4455 - protein, 17 aa, synthetic construct
  REGION 1..17: note = TNR1B Linker (8-24)
SMAPGAVHLPQPVSTRS

SEQ ID NO: 4456 - protein, 16 aa, synthetic construct
  REGION 1..16: note = TNR1B Linker (9-24)
MAPGAVHLPQPVSTRS

SEQ ID NO: 4457 - protein, 15 aa, synthetic construct
  REGION 1..15: note = TNR1B Linker (10-24)
APGAVHLPQPVSTRS

SEQ ID NO: 4458 - protein, 14 aa, synthetic construct
  REGION 1..14: note = TNR1B Linker (11-24)
PGAVHLPQPVSTRS

SEQ ID NO: 4459 - protein, 13 aa, synthetic construct
  REGION 1..13: note = TNR1B Linker (12-24)
GAVHLPQPVSTRS

SEQ ID NO: 4460 - protein, 12 aa, synthetic construct
  REGION 1..12: note = TNR1B Linker (13-24)
AVHLPQPVSTRS

SEQ ID NO: 4461 - protein, 11 aa, synthetic construct
  REGION 1..11: note = TNR1B Linker (14-24)
VHLPQPVSTRS

SEQ ID NO: 4462 - protein, 10 aa, synthetic construct
  REGION 1..10: note = TNR1B Linker (15-24)
HLPQPVSTRS

SEQ ID NO: 4463 - protein, 9 aa, synthetic construct
  REGION 1..9: note = TNR1B Linker (16-24)
LPQPVSTRS

SEQ ID NO: 4464 - protein, 8 aa, synthetic construct
  REGION 1..8: note = TNR1B Linker (17-24)
PQPVSTRS

SEQ ID NO: 4465 - protein, 7 aa, synthetic construct
  REGION 1..7: note = TNR1B Linker (18-24)
QPVSTRS

SEQ ID NO: 4466 - protein, 6 aa, synthetic construct
  REGION 1..6: note = TNR1B Linker (19-24)
PVSTRS

SEQ ID NO: 4467 - protein, 5 aa, synthetic construct
  REGION 1..5: note = TNR1B Linker (20-24)
VSTRS

SEQ ID NO: 4468 - protein, 23 aa, synthetic construct
  REGION 1..23: note = TNR1B Linker (1-23)
TSTSPTRSMAPGAVHLPQPVSTR

SEQ ID NO: 4469 - protein, 22 aa, synthetic construct
  REGION 1..22: note = TNR1B Linker (2-23)
STSPTRSMAPGAVHLPQPVSTR

SEQ ID NO: 4470 - protein, 21 aa, synthetic construct
  REGION 1..21: note = TNR1B Linker (3-23)
TSPTRSMAPGAVHLPQPVSTR

SEQ ID NO: 4471 - protein, 20 aa, synthetic construct
  REGION 1..20: note = TNR1B Linker (4-23)
SPTRSMAPGAVHLPQPVSTR

SEQ ID NO: 4472 - protein, 19 aa, synthetic construct
  REGION 1..19: note = TNR1B Linker (5-23)
PTRSMAPGAVHLPQPVSTR

SEQ ID NO: 4473 - protein, 18 aa, synthetic construct
  REGION 1..18: note = TNR1B Linker (6-23)
TRSMAPGAVHLPQPVSTR

SEQ ID NO: 4474 - protein, 17 aa, synthetic construct
  REGION 1..17: note = TNR1B Linker (7-23)
RSMAPGAVHLPQPVSTR

SEQ ID NO: 4475 - protein, 16 aa, synthetic construct
  REGION 1..16: note = TNR1B Linker (8-23)
SMAPGAVHLPQPVSTR

SEQ ID NO: 4476 - protein, 15 aa, synthetic construct
  REGION 1..15: note = TNR1B Linker (9-23)
MAPGAVHLPQPVSTR

SEQ ID NO: 4477 - protein, 14 aa, synthetic construct
  REGION 1..14: note = TNR1B Linker (10-23)
APGAVHLPQPVSTR

SEQ ID NO: 4478 - protein, 13 aa, synthetic construct
  REGION 1..13: note = TNR1B Linker (11-23)
PGAVHLPQPVSTR

SEQ ID NO: 4479 - protein, 12 aa, synthetic construct
  REGION 1..12: note = TNR1B Linker (12-23)
GAVHLPQPVSTR

SEQ ID NO: 4480 - protein, 11 aa, synthetic construct
  REGION 1..11: note = TNR1B Linker (13-23)
AVHLPQPVSTR

SEQ ID NO: 4481 - protein, 10 aa, synthetic construct
  REGION 1..10: note = TNR1B Linker (14-23)
VHLPQPVSTR

SEQ ID NO: 4482 - protein, 9 aa, synthetic construct
  REGION 1..9: note = TNR1B Linker (15-23)
HLPQPVSTR

SEQ ID NO: 4483 - protein, 8 aa, synthetic construct
  REGION 1..8: note = TNR1B Linker (16-23)
LPQPVSTR

SEQ ID NO: 4484 - protein, 7 aa, synthetic construct
  REGION 1..7: note = TNR1B Linker (17-23)
PQPVSTR

SEQ ID NO: 4485 - protein, 6 aa, synthetic construct
  REGION 1..6: note = TNR1B Linker (18-23)
QPVSTR

SEQ ID NO: 4486 - protein, 5 aa, synthetic construct
  REGION 1..5: note = TNR1B Linker (19-23)
PVSTR

SEQ ID NO: 4487 - protein, 22 aa, synthetic construct
  REGION 1..22: note = TNR1B Linker (1-22)
TSTSPTRSMAPGAVHLPQPVST

SEQ ID NO: 4488 - protein, 21 aa, synthetic construct
  REGION 1..21: note = TNR1B Linker (2-22)
STSPTRSMAPGAVHLPQPVST

SEQ ID NO: 4489 - protein, 20 aa, synthetic construct
  REGION 1..20: note = TNR1B Linker (3-22)
TSPTRSMAPGAVHLPQPVST

SEQ ID NO: 4490 - protein, 19 aa, synthetic construct
  REGION 1..19: note = TNR1B Linker (4-22)
SPTRSMAPGAVHLPQPVST

SEQ ID NO: 4491 - protein, 18 aa, synthetic construct
  REGION 1..18: note = TNR1B Linker (5-22)
PTRSMAPGAVHLPQPVST

SEQ ID NO: 4492 - protein, 17 aa, synthetic construct
  REGION 1..17: note = TNR1B Linker (6-22)
TRSMAPGAVHLPQPVST

SEQ ID NO: 4493 - protein, 16 aa, synthetic construct
  REGION 1..16: note = TNR1B Linker (7-22)
RSMAPGAVHLPQPVST

SEQ ID NO: 4494 - protein, 15 aa, synthetic construct
  REGION 1..15: note = TNR1B Linker (8-22)
SMAPGAVHLPQPVST

SEQ ID NO: 4495 - protein, 14 aa, synthetic construct
  REGION 1..14: note = TNR1B Linker (9-22)
MAPGAVHLPQPVST

SEQ ID NO: 4496 - protein, 13 aa, synthetic construct
  REGION 1..13: note = TNR1B Linker (10-22)
APGAVHLPQPVST

SEQ ID NO: 4497 - protein, 12 aa, synthetic construct
  REGION 1..12: note = TNR1B Linker (11-22)
PGAVHLPQPVST

SEQ ID NO: 4498 - protein, 11 aa, synthetic construct
  REGION 1..11: note = TNR1B Linker (12-22)
GAVHLPQPVST

SEQ ID NO: 4499 - protein, 10 aa, synthetic construct
  REGION 1..10: note = TNR1B Linker (13-22)
AVHLPQPVST

SEQ ID NO: 4500 - protein, 9 aa, synthetic construct
  REGION 1..9: note = TNR1B Linker (14-22)
VHLPQPVST

SEQ ID NO: 4501 - protein, 8 aa, synthetic construct
  REGION 1..8: note = TNR1B Linker (15-22)
HLPQPVST

SEQ ID NO: 4502 - protein, 7 aa, synthetic construct
  REGION 1..7: note = TNR1B Linker (16-22)
LPQPVST

SEQ ID NO: 4503 - protein, 6 aa, synthetic construct
  REGION 1..6: note = TNR1B Linker (17-22)
PQPVST

SEQ ID NO: 4504 - protein, 5 aa, synthetic construct
  REGION 1..5: note = TNR1B Linker (18-22)
QPVST

SEQ ID NO: 4505 - protein, 21 aa, synthetic construct
  REGION 1..21: note = TNR1B Linker (1-21)
TSTSPTRSMAPGAVHLPQPVS

SEQ ID NO: 4506 - protein, 20 aa, synthetic construct
  REGION 1..20: note = TNR1B Linker (2-21)
STSPTRSMAPGAVHLPQPVS

SEQ ID NO: 4507 - protein, 19 aa, synthetic construct
  REGION 1..19: note = TNR1B Linker (3-21)
TSPTRSMAPGAVHLPQPVS

SEQ ID NO: 4508 - protein, 18 aa, synthetic construct
  REGION 1..18: note = TNR1B Linker (4-21)
SPTRSMAPGAVHLPQPVS

SEQ ID NO: 4509 - protein, 17 aa, synthetic construct
  REGION 1..17: note = TNR1B Linker (5-21)
PTRSMAPGAVHLPQPVS

SEQ ID NO: 4510 - protein, 16 aa, synthetic construct
  REGION 1..16: note = TNR1B Linker (6-21)
TRSMAPGAVHLPQPVS

SEQ ID NO: 4511 - protein, 15 aa, synthetic construct
  REGION 1..15: note = TNR1B Linker (7-21)
RSMAPGAVHLPQPVS

SEQ ID NO: 4512 - protein, 14 aa, synthetic construct
  REGION 1..14: note = TNR1B Linker (8-21)
SMAPGAVHLPQPVS

SEQ ID NO: 4513 - protein, 13 aa, synthetic construct
  REGION 1..13: note = TNR1B Linker (9-21)
MAPGAVHLPQPVS

SEQ ID NO: 4514 - protein, 12 aa, synthetic construct
  REGION 1..12: note = TNR1B Linker (10-21)
APGAVHLPQPVS

SEQ ID NO: 4515 - protein, 11 aa, synthetic construct
  REGION 1..11: note = TNR1B Linker (11-21)
PGAVHLPQPVS

SEQ ID NO: 4516 - protein, 10 aa, synthetic construct
  REGION 1..10: note = TNR1B Linker (12-21)
GAVHLPQPVS

SEQ ID NO: 4517 - protein, 9 aa, synthetic construct
  REGION 1..9: note = TNR1B Linker (13-21)
AVHLPQPVS

SEQ ID NO: 4518 - protein, 8 aa, synthetic construct
  REGION 1..8: note = TNR1B Linker (14-21)
VHLPQPVS

SEQ ID NO: 4519 - protein, 7 aa, synthetic construct
  REGION 1..7: note = TNR1B Linker (15-21)
HLPQPVS

SEQ ID NO: 4520 - protein, 6 aa, synthetic construct
  REGION 1..6: note = TNR1B Linker (16-21)
LPQPVS

SEQ ID NO: 4521 - protein, 5 aa, synthetic construct
  REGION 1..5: note = TNR1B Linker (17-21)
PQPVS

SEQ ID NO: 4522 - protein, 20 aa, synthetic construct
  REGION 1..20: note = TNR1B Linker (1-20)
TSTSPTRSMAPGAVHLPQPV

SEQ ID NO: 4523 - protein, 19 aa, synthetic construct
  REGION 1..19: note = TNR1B Linker (2-20)
STSPTRSMAPGAVHLPQPV

SEQ ID NO: 4524 - protein, 18 aa, synthetic construct
  REGION 1..18: note = TNR1B Linker (3-20)
TSPTRSMAPGAVHLPQPV

SEQ ID NO: 4525 - protein, 17 aa, synthetic construct
  REGION 1..17: note = TNR1B Linker (4-20)
SPTRSMAPGAVHLPQPV

SEQ ID NO: 4526 - protein, 16 aa, synthetic construct
  REGION 1..16: note = TNR1B Linker (5-20)
PTRSMAPGAVHLPQPV

SEQ ID NO: 4527 - protein, 15 aa, synthetic construct
  REGION 1..15: note = TNR1B Linker (6-20)
TRSMAPGAVHLPQPV

SEQ ID NO: 4528 - protein, 14 aa, synthetic construct
  REGION 1..14: note = TNR1B Linker (7-20)
RSMAPGAVHLPQPV

SEQ ID NO: 4529 - protein, 13 aa, synthetic construct
  REGION 1..13: note = TNR1B Linker (8-20)
SMAPGAVHLPQPV

SEQ ID NO: 4530 - protein, 12 aa, synthetic construct
  REGION 1..12: note = TNR1B Linker (9-20)
MAPGAVHLPQPV

SEQ ID NO: 4531 - protein, 11 aa, synthetic construct
  REGION 1..11: note = TNR1B Linker (10-20)
APGAVHLPQPV

SEQ ID NO: 4532 - protein, 10 aa, synthetic construct
  REGION 1..10: note = TNR1B Linker (11-20)
PGAVHLPQPV

SEQ ID NO: 4533 - protein, 9 aa, synthetic construct
  REGION 1..9: note = TNR1B Linker (12-20)
GAVHLPQPV

SEQ ID NO: 4534 - protein, 8 aa, synthetic construct
  REGION 1..8: note = TNR1B Linker (13-20)
AVHLPQPV

SEQ ID NO: 4535 - protein, 7 aa, synthetic construct
  REGION 1..7: note = TNR1B Linker (14-20)
VHLPQPV

SEQ ID NO: 4536 - protein, 6 aa, synthetic construct
  REGION 1..6: note = TNR1B Linker (15-20)
HLPQPV

SEQ ID NO: 4537 - protein, 5 aa, synthetic construct
  REGION 1..5: note = TNR1B Linker (16-20)
LPQPV

SEQ ID NO: 4538 - protein, 19 aa, synthetic construct
  REGION 1..19: note = TNR1B Linker (1-19)
TSTSPTRSMAPGAVHLPQP

SEQ ID NO: 4539 - protein, 18 aa, synthetic construct
  REGION 1..18: note = TNR1B Linker (2-19)
STSPTRSMAPGAVHLPQP

SEQ ID NO: 4540 - protein, 17 aa, synthetic construct
  REGION 1..17: note = TNR1B Linker (3-19)
TSPTRSMAPGAVHLPQP

SEQ ID NO: 4541 - protein, 16 aa, synthetic construct
  REGION 1..16: note = TNR1B Linker (4-19)
SPTRSMAPGAVHLPQP

SEQ ID NO: 4542 - protein, 15 aa, synthetic construct
  REGION 1..15: note = TNR1B Linker (5-19)
PTRSMAPGAVHLPQP

SEQ ID NO: 4543 - protein, 14 aa, synthetic construct
  REGION 1..14: note = TNR1B Linker (6-19)
TRSMAPGAVHLPQP

SEQ ID NO: 4544 - protein, 13 aa, synthetic construct
  REGION 1..13: note = TNR1B Linker (7-19)
RSMAPGAVHLPQP

SEQ ID NO: 4545 - protein, 12 aa, synthetic construct
  REGION 1..12: note = TNR1B Linker (8-19)
SMAPGAVHLPQP

SEQ ID NO: 4546 - protein, 11 aa, synthetic construct
  REGION 1..11: note = TNR1B Linker (9-19)
MAPGAVHLPQP

SEQ ID NO: 4547 - protein, 10 aa, synthetic construct
  REGION 1..10: note = TNR1B Linker (10-19)
APGAVHLPQP

SEQ ID NO: 4548 - protein, 9 aa, synthetic construct
  REGION 1..9: note = TNR1B Linker (11-19)
PGAVHLPQP

SEQ ID NO: 4549 - protein, 8 aa, synthetic construct
  REGION 1..8: note = TNR1B Linker (12-19)
GAVHLPQP

SEQ ID NO: 4550 - protein, 7 aa, synthetic construct
  REGION 1..7: note = TNR1B Linker (13-19)
AVHLPQP

SEQ ID NO: 4551 - protein, 6 aa, synthetic construct
  REGION 1..6: note = TNR1B Linker (14-19)
VHLPQP

SEQ ID NO: 4552 - protein, 5 aa, synthetic construct
  REGION 1..5: note = TNR1B Linker (15-19)
HLPQP

SEQ ID NO: 4553 - protein, 18 aa, synthetic construct
  REGION 1..18: note = TNR1B Linker (1-18)
TSTSPTRSMAPGAVHLPQ

SEQ ID NO: 4554 - protein, 17 aa, synthetic construct
  REGION 1..17: note = TNR1B Linker (2-18)
STSPTRSMAPGAVHLPQ

SEQ ID NO: 4555 - protein, 16 aa, synthetic construct
  REGION 1..16: note = TNR1B Linker (3-18)
TSPTRSMAPGAVHLPQ

SEQ ID NO: 4556 - protein, 15 aa, synthetic construct
  REGION 1..15: note = TNR1B Linker (4-18)
SPTRSMAPGAVHLPQ

SEQ ID NO: 4557 - protein, 14 aa, synthetic construct
  REGION 1..14: note = TNR1B Linker (5-18)
PTRSMAPGAVHLPQ

SEQ ID NO: 4558 - protein, 13 aa, synthetic construct
  REGION 1..13: note = TNR1B Linker (6-18)
TRSMAPGAVHLPQ

SEQ ID NO: 4559 - protein, 12 aa, synthetic construct
  REGION 1..12: note = TNR1B Linker (7-18)
RSMAPGAVHLPQ

SEQ ID NO: 4560 - protein, 11 aa, synthetic construct
  REGION 1..11: note = TNR1B Linker (8-18)
SMAPGAVHLPQ

SEQ ID NO: 4561 - protein, 10 aa, synthetic construct
  REGION 1..10: note = TNR1B Linker (9-18)
MAPGAVHLPQ

SEQ ID NO: 4562 - protein, 9 aa, synthetic construct
  REGION 1..9: note = TNR1B Linker (10-18)
APGAVHLPQ

SEQ ID NO: 4563 - protein, 8 aa, synthetic construct
  REGION 1..8: note = TNR1B Linker (11-18)
PGAVHLPQ

SEQ ID NO: 4564 - protein, 7 aa, synthetic construct
  REGION 1..7: note = TNR1B Linker (12-18)
GAVHLPQ

SEQ ID NO: 4565 - protein, 6 aa, synthetic construct
  REGION 1..6: note = TNR1B Linker (13-18)
AVHLPQ

SEQ ID NO: 4566 - protein, 5 aa, synthetic construct
  REGION 1..5: note = TNR1B Linker (14-18)
VHLPQ

SEQ ID NO: 4567 - protein, 17 aa, synthetic construct
  REGION 1..17: note = TNR1B Linker (1-17)
TSTSPTRSMAPGAVHLP

SEQ ID NO: 4568 - protein, 16 aa, synthetic construct
  REGION 1..16: note = TNR1B Linker (2-17)
STSPTRSMAPGAVHLP

SEQ ID NO: 4569 - protein, 15 aa, synthetic construct
  REGION 1..15: note = TNR1B Linker (3-17)
TSPTRSMAPGAVHLP

SEQ ID NO: 4570 - protein, 14 aa, synthetic construct
  REGION 1..14: note = TNR1B Linker (4-17)
SPTRSMAPGAVHLP

SEQ ID NO: 4571 - protein, 13 aa, synthetic construct
  REGION 1..13: note = TNR1B Linker (5-17)
PTRSMAPGAVHLP

SEQ ID NO: 4572 - protein, 12 aa, synthetic construct
  REGION 1..12: note = TNR1B Linker (6-17)
TRSMAPGAVHLP

SEQ ID NO: 4573 - protein, 11 aa, synthetic construct
  REGION 1..11: note = TNR1B Linker (7-17)
RSMAPGAVHLP

SEQ ID NO: 4574 - protein, 10 aa, synthetic construct
  REGION 1..10: note = TNR1B Linker (8-17)
SMAPGAVHLP

SEQ ID NO: 4575 - protein, 9 aa, synthetic construct
  REGION 1..9: note = TNR1B Linker (9-17)
MAPGAVHLP

SEQ ID NO: 4576 - protein, 8 aa, synthetic construct
  REGION 1..8: note = TNR1B Linker (10-17)
APGAVHLP

SEQ ID NO: 4577 - protein, 7 aa, synthetic construct
  REGION 1..7: note = TNR1B Linker (11-17)
PGAVHLP

SEQ ID NO: 4578 - protein, 6 aa, synthetic construct
  REGION 1..6: note = TNR1B Linker (12-17)
GAVHLP

SEQ ID NO: 4579 - protein, 5 aa, synthetic construct
  REGION 1..5: note = TNR1B Linker (13-17)
AVHLP

SEQ ID NO: 4580 - protein, 16 aa, synthetic construct
  REGION 1..16: note = TNR1B Linker (1-16)
TSTSPTRSMAPGAVHL

SEQ ID NO: 4581 - protein, 15 aa, synthetic construct
  REGION 1..15: note = TNR1B Linker (2-16)
STSPTRSMAPGAVHL

SEQ ID NO: 4582 - protein, 14 aa, synthetic construct
  REGION 1..14: note = TNR1B Linker (3-16)
TSPTRSMAPGAVHL

SEQ ID NO: 4583 - protein, 13 aa, synthetic construct
  REGION 1..13: note = TNR1B Linker (4-16)
SPTRSMAPGAVHL

SEQ ID NO: 4584 - protein, 12 aa, synthetic construct
  REGION 1..12: note = TNR1B Linker (5-16)
PTRSMAPGAVHL

SEQ ID NO: 4585 - protein, 11 aa, synthetic construct
  REGION 1..11: note = TNR1B Linker (6-16)
TRSMAPGAVHL

SEQ ID NO: 4586 - protein, 10 aa, synthetic construct
  REGION 1..10: note = TNR1B Linker (7-16)
RSMAPGAVHL

SEQ ID NO: 4587 - protein, 9 aa, synthetic construct
  REGION 1..9: note = TNR1B Linker (8-16)
SMAPGAVHL

SEQ ID NO: 4588 - protein, 8 aa, synthetic construct
  REGION 1..8: note = TNR1B Linker (9-16)
MAPGAVHL

SEQ ID NO: 4589 - protein, 7 aa, synthetic construct
  REGION 1..7: note = TNR1B Linker (10-16)
APGAVHL

SEQ ID NO: 4590 - protein, 6 aa, synthetic construct
  REGION 1..6: note = TNR1B Linker (11-16)
PGAVHL

SEQ ID NO: 4591 - protein, 5 aa, synthetic construct
  REGION 1..5: note = TNR1B Linker (12-16)
GAVHL

SEQ ID NO: 4592 - protein, 15 aa, synthetic construct
  REGION 1..15: note = TNR1B Linker (1-15)
TSTSPTRSMAPGAVH

SEQ ID NO: 4593 - protein, 14 aa, synthetic construct
  REGION 1..14: note = TNR1B Linker (2-15)
STSPTRSMAPGAVH

SEQ ID NO: 4594 - protein, 13 aa, synthetic construct
  REGION 1..13: note = TNR1B Linker (3-15)
TSPTRSMAPGAVH

SEQ ID NO: 4595 - protein, 12 aa, synthetic construct
  REGION 1..12: note = TNR1B Linker (4-15)
SPTRSMAPGAVH

SEQ ID NO: 4596 - protein, 11 aa, synthetic construct
  REGION 1..11: note = TNR1B Linker (5-15)
PTRSMAPGAVH

SEQ ID NO: 4597 - protein, 10 aa, synthetic construct
  REGION 1..10: note = TNR1B Linker (6-15)
TRSMAPGAVH

SEQ ID NO: 4598 - protein, 9 aa, synthetic construct
  REGION 1..9: note = TNR1B Linker (7-15)
RSMAPGAVH

SEQ ID NO: 4599 - protein, 8 aa, synthetic construct
  REGION 1..8: note = TNR1B Linker (8-15)
SMAPGAVH

SEQ ID NO: 4600 - protein, 7 aa, synthetic construct
  REGION 1..7: note = TNR1B Linker (9-15)
MAPGAVH

SEQ ID NO: 4601 - protein, 6 aa, synthetic construct
  REGION 1..6: note = TNR1B Linker (10-15)
APGAVH

SEQ ID NO: 4602 - protein, 5 aa, synthetic construct
  REGION 1..5: note = TNR1B Linker (11-15)
PGAVH

SEQ ID NO: 4603 - protein, 14 aa, synthetic construct
  REGION 1..14: note = TNR1B Linker (1-14)
TSTSPTRSMAPGAV

SEQ ID NO: 4604 - protein, 13 aa, synthetic construct
  REGION 1..13: note = TNR1B Linker (2-14)
STSPTRSMAPGAV

SEQ ID NO: 4605 - protein, 12 aa, synthetic construct
  REGION 1..12: note = TNR1B Linker (3-14)
TSPTRSMAPGAV

SEQ ID NO: 4606 - protein, 11 aa, synthetic construct
  REGION 1..11: note = TNR1B Linker (4-14)
SPTRSMAPGAV

SEQ ID NO: 4607 - protein, 10 aa, synthetic construct
  REGION 1..10: note = TNR1B Linker (5-14)
PTRSMAPGAV

SEQ ID NO: 4608 - protein, 9 aa, synthetic construct
  REGION 1..9: note = TNR1B Linker (6-14)
TRSMAPGAV

SEQ ID NO: 4609 - protein, 8 aa, synthetic construct
  REGION 1..8: note = TNR1B Linker (7-14)
RSMAPGAV

SEQ ID NO: 4610 - protein, 7 aa, synthetic construct
  REGION 1..7: note = TNR1B Linker (8-14)
SMAPGAV

SEQ ID NO: 4611 - protein, 6 aa, synthetic construct
  REGION 1..6: note = TNR1B Linker (9-14)
MAPGAV

SEQ ID NO: 4612 - protein, 5 aa, synthetic construct
  REGION 1..5: note = TNR1B Linker (10-14)
APGAV

SEQ ID NO: 4613 - protein, 13 aa, synthetic construct
  REGION 1..13: note = TNR1B Linker (1-13)
TSTSPTRSMAPGA

SEQ ID NO: 4614 - protein, 12 aa, synthetic construct
  REGION 1..12: note = TNR1B Linker (2-13)
STSPTRSMAPGA

SEQ ID NO: 4615 - protein, 11 aa, synthetic construct
  REGION 1..11: note = TNR1B Linker (3-13)
TSPTRSMAPGA

SEQ ID NO: 4616 - protein, 10 aa, synthetic construct
  REGION 1..10: note = TNR1B Linker (4-13)
SPTRSMAPGA

SEQ ID NO: 4617 - protein, 9 aa, synthetic construct
  REGION 1..9: note = TNR1B Linker (5-13)
PTRSMAPGA

SEQ ID NO: 4618 - protein, 8 aa, synthetic construct
  REGION 1..8: note = TNR1B Linker (6-13)
TRSMAPGA

SEQ ID NO: 4619 - protein, 7 aa, synthetic construct
  REGION 1..7: note = TNR1B Linker (7-13)
RSMAPGA

SEQ ID NO: 4620 - protein, 6 aa, synthetic construct
  REGION 1..6: note = TNR1B Linker (8-13)
SMAPGA

SEQ ID NO: 4621 - protein, 5 aa, synthetic construct
  REGION 1..5: note = TNR1B Linker (9-13)
MAPGA

SEQ ID NO: 4622 - protein, 12 aa, synthetic construct
  REGION 1..12: note = TNR1B Linker (1-12)
TSTSPTRSMAPG

SEQ ID NO: 4623 - protein, 11 aa, synthetic construct
  REGION 1..11: note = TNR1B Linker (2-12)
STSPTRSMAPG

SEQ ID NO: 4624 - protein, 10 aa, synthetic construct
  REGION 1..10: note = TNR1B Linker (3-12)
TSPTRSMAPG

SEQ ID NO: 4625 - protein, 9 aa, synthetic construct
  REGION 1..9: note = TNR1B Linker (4-12)
SPTRSMAPG

SEQ ID NO: 4626 - protein, 8 aa, synthetic construct
  REGION 1..8: note = TNR1B Linker (5-12)
PTRSMAPG

SEQ ID NO: 4627 - protein, 7 aa, synthetic construct
  REGION 1..7: note = TNR1B Linker (6-12)
TRSMAPG

SEQ ID NO: 4628 - protein, 6 aa, synthetic construct
  REGION 1..6: note = TNR1B Linker (7-12)
RSMAPG

SEQ ID NO: 4629 - protein, 5 aa, synthetic construct
  REGION 1..5: note = TNR1B Linker (8-12)
SMAPG

SEQ ID NO: 4630 - protein, 11 aa, synthetic construct
  REGION 1..11: note = TNR1B Linker (1-11)
TSTSPTRSMAP

SEQ ID NO: 4631 - protein, 10 aa, synthetic construct
  REGION 1..10: note = TNR1B Linker (2-11)
STSPTRSMAP

SEQ ID NO: 4632 - protein, 9 aa, synthetic construct
  REGION 1..9: note = TNR1B Linker (3-11)
TSPTRSMAP

SEQ ID NO: 4633 - protein, 8 aa, synthetic construct
  REGION 1..8: note = TNR1B Linker (4-11)
SPTRSMAP

SEQ ID NO: 4634 - protein, 7 aa, synthetic construct
  REGION 1..7: note = TNR1B Linker (5-11)
PTRSMAP

SEQ ID NO: 4635 - protein, 6 aa, synthetic construct
  REGION 1..6: note = TNR1B Linker (6-11)
TRSMAP

SEQ ID NO: 4636 - protein, 5 aa, synthetic construct
  REGION 1..5: note = TNR1B Linker (7-11)
RSMAP

SEQ ID NO: 4637 - protein, 10 aa, synthetic construct
  REGION 1..10: note = TNR1B Linker (1-10)
TSTSPTRSMA

SEQ ID NO: 4638 - protein, 9 aa, synthetic construct
  REGION 1..9: note = TNR1B Linker (2-10)
STSPTRSMA

SEQ ID NO: 4639 - protein, 8 aa, synthetic construct
  REGION 1..8: note = TNR1B Linker (3-10)
TSPTRSMA

SEQ ID NO: 4640 - protein, 7 aa, synthetic construct
  REGION 1..7: note = TNR1B Linker (4-10)
SPTRSMA

SEQ ID NO: 4641 - protein, 6 aa, synthetic construct
  REGION 1..6: note = TNR1B Linker (5-10)
PTRSMA

SEQ ID NO: 4642 - protein, 5 aa, synthetic construct
  REGION 1..5: note = TNR1B Linker (6-10)
TRSMA

SEQ ID NO: 4643 - protein, 9 aa, synthetic construct
  REGION 1..9: note = TNR1B Linker (1-9)
TSTSPTRSM

SEQ ID NO: 4644 - protein, 8 aa, synthetic construct
  REGION 1..8: note = TNR1B Linker (2-9)
STSPTRSM

SEQ ID NO: 4645 - protein, 7 aa, synthetic construct
  REGION 1..7: note = TNR1B Linker (3-9)
TSPTRSM

SEQ ID NO: 4646 - protein, 6 aa, synthetic construct
  REGION 1..6: note = TNR1B Linker (4-9)
SPTRSM

SEQ ID NO: 4647 - protein, 5 aa, synthetic construct
  REGION 1..5: note = TNR1B Linker (5-9)
PTRSM

SEQ ID NO: 4648 - protein, 8 aa, synthetic construct
  REGION 1..8: note = TNR1B Linker (1-8)
TSTSPTRS

SEQ ID NO: 4649 - protein, 7 aa, synthetic construct
  REGION 1..7: note = TNR1B Linker (2-8)
STSPTRS

SEQ ID NO: 4650 - protein, 6 aa, synthetic construct
  REGION 1..6: note = TNR1B Linker (3-8)
TSPTRS

SEQ ID NO: 4651 - protein, 5 aa, synthetic construct
  REGION 1..5: note = TNR1B Linker (4-8)
SPTRS

SEQ ID NO: 4652 - protein, 7 aa, synthetic construct
  REGION 1..7: note = TNR1B Linker (1-7)
TSTSPTR

SEQ ID NO: 4653 - protein, 6 aa, synthetic construct
  REGION 1..6: note = TNR1B Linker (2-7)
STSPTR

SEQ ID NO: 4654 - protein, 5 aa, synthetic construct
  REGION 1..5: note = TNR1B Linker (3-7)
TSPTR

SEQ ID NO: 4655 - protein, 6 aa, synthetic construct
  REGION 1..6: note = TNR1B Linker (1-6)
TSTSPT

SEQ ID NO: 4656 - protein, 5 aa, synthetic construct
  REGION 1..5: note = TNR1B Linker (2-6)
STSPT

SEQ ID NO: 4657 - protein, 31 aa, synthetic construct; identical to SEQ ID NO: 321
  REGION 1..31: note = GLP-1 peptide

SEQ ID NO: 4658 - protein, 606 aa, synthetic construct; identical to SEQ ID NO: 723
  REGION 1..606: note = R_VH-CH1/K147E/K213E/CLD201/hole/PGLALA/RF

SEQ ID NO: 4659 - protein, 440 aa, synthetic construct; identical to SEQ ID NO: 660
  REGION 1..440: note = Sp34_VK-CH1/knob/PGLALA/RF

SEQ ID NO: 4660 - protein, 606 aa, synthetic construct; identical to SEQ ID NO: 725
  REGION 1..606: note = R_VH-CH1/Q39K/S183E/CLD201/hole/PGLALA/RF

SEQ ID NO: 4661 - protein, 440 aa, synthetic construct; identical to SEQ ID NO: 661
  REGION 1..440: note = Sp34_VK-CH1/knob/Q38E/S183K/PGLALA/RF

SEQ ID NO: 4662 - protein, 440 aa, synthetic construct; identical to SEQ ID NO: 662
  REGION 1..440: note = Sp34_VK-CH1/knob/Q38K/S183K/PGLALA/RF

SEQ ID NO: 4663 - protein, 450 aa, synthetic construct
  REGION 1..450: note = R_VH-CH1/K147E/K213E/knob/PGLALA
QVQLQQPGAELVKPGASVKMSCKASGYTFTSYNMHWVKQTPGRGLEWIGAIYPGNGDTSYNQKFKGKATLTADKSSSTAYMQLSSLTSEDSAVYYCARSTYYGGDWYFNVWGAGTTVTVSAASTKGPSVFPLAPSSKSTSGGTAALGCLVEDYFPEPVTVSWNSGALTSGVHTFPAVLQSSGLYSLSSVVTVPSSSLGTQTYICNVNHKPSNTKVDEKVEPKSCDKTHTCPPCPAPEAAGGPSVFLFPPKPKDTLMISRTPEVTCVVVDVSHEDPEVKFNWYVDGVEVHNAKTKPREEQYNSTYRVVSVLTVLHQDWLNGKEYKCKVSNKALGAPIEKTISKAKGQPREPQVYTLPPCRDELTKNQVSLWCLVKGFYPSDIAVEWESNGQPENNYKTTPPVLDSDGSFFLYSKLTVDKSRWQQGNVFSCSVMHEALHNHYTQKSLSLSPG

SEQ ID NO: 4664 - protein, 450 aa, synthetic construct
  REGION 1..450: note = R_VH-CH1/Q39K/S183E/knob/PGLALA
QVQLQQPGAELVKPGASVKMSCKASGYTFTSYNMHWVKKTPGRGLEWIGAIYPGNGDTSYNQKFKGKATLTADKSSSTAYMQLSSLTSEDSAVYYCARSTYYGGDWYFNVWGAGTTVTVSAASTKGPSVFPLAPSSKSTSGGTAALGCLVKDYFPEPVTVSWNSGALTSGVHTFPAVLQSSGLYSLESVVTVPSSSLGTQTYICNVNHKPSNTKVDKKVEPKSCDKTHTCPPCPAPEAAGGPSVFLFPPKPKDTLMISRTPEVTCVVVDVSHEDPEVKFNWYVDGVEVHNAKTKPREEQYNSTYRVVSVLTVLHQDWLNGKEYKCKVSNKALGAPIEKTISKAKGQPREPQVYTLPPCRDELTKNQVSLWCLVKGFYPSDIAVEWESNGQPENNYKTTPPVLDSDGSFFLYSKLTVDKSRWQQGNVFSCSVMHEALHNHYTQKSLSLSPG

SEQ ID NO: 4665 - protein, 594 aa, synthetic construct
  REGION 1..594: note = R_VH-CH1/K147E/K213E/CLD201/Sp34_VK-CH1
QVQLQQPGAELVKPGASVKMSCKASGYTFTSYNMHWVKQTPGRGLEWIGAIYPGNGDTSYNQKFKGKATLTADKSSSTAYMQLSSLTSEDSAVYYCARSTYYGGDWYFNVWGAGTTVTVSAASTKGPSVFPLAPSSKSTSGGTAALGCLVEDYFPEPVTVSWNSGALTSGVHTFPAVLQSSGLYSLSSVVTVPSSSLGTQTYICNVNHKPSNTKVDEKVEPKSCTDWSPYADQSIKVRISLKSALGDKAYEWNDNEMYLFRSSVAYAMRQYFLKVKNQMILFGEEDVRVANLKPRISFNFFVTAPKNVSDIIPRTEVEKAIRMSRSRINDAFRLNDNSLEFLGIQPTLGPPNQPPVSTSTSPTRSMAPGAVHLPQPVSTRQAVVTQEPSLTVSPGGTVTLTCGSSTGAVTTSNYANWVQEKPGQAFRGLIGGTNKRAPGTPARFSGSLLGGKAALTLSGAQPEDEAEYYCALWYSNLWVFGGGTKLTVLSSASTKGPSVFPLAPSSKSTSGGTAALGCLVKDYFPEPVTVSWNSGALTSGVHTFPAVLQSSGLYSLSSVVTVPSSSLGTQTYICNVNHKPSNTKVDKKVEPKSC

SEQ ID NO: 4666 - protein, 594 aa, synthetic construct
  REGION 1..594: note = R_VH-CH1/Q39K/S183E/CLD201/Sp34_VK-CH1/Q38E/S183K
QVQLQQPGAELVKPGASVKMSCKASGYTFTSYNMHWVKKTPGRGLEWIGAIYPGNGDTSYNQKFKGKATLTADKSSSTAYMQLSSLTSEDSAVYYCARSTYYGGDWYFNVWGAGTTVTVSAASTKGPSVFPLAPSSKSTSGGTAALGCLVKDYFPEPVTVSWNSGALTSGVHTFPAVLQSSGLYSLESVVTVPSSSLGTQTYICNVNHKPSNTKVDKKVEPKSCTDWSPYADQSIKVRISLKSALGDKAYEWNDNEMYLFRSSVAYAMRQYFLKVKNQMILFGEEDVRVANLKPRISFNFFVTAPKNVSDIIPRTEVEKAIRMSRSRINDAFRLNDNSLEFLGIQPTLGPPNQPPVSTSTSPTRSMAPGAVHLPQPVSTRQAVVTQEPSLTVSPGGTVTLTCGSSTGAVTTSNYANWVQEKPGQAFRGLIGGTNKRAPGTPARFSGSLLGGKAALTLSGAQPEDEAEYYCALWYSNLWVFGGGTKLTVLSSASTKGPSVFPLAPSSKSTSGGTAALGCLVKDYFPEPVTVSWNSGALTSGVHTFPAVLQSSGLYSLKSVVTVPSSSLGTQTYICNVNHKPSNTKVDKKVEPKSC

SEQ ID NO: 4667 - protein, 594 aa, synthetic construct
  REGION 1..594: note = R_VH-CH1/Q39K/S183E/CLD201/Sp34_VK-CH1/Q38K/S183K
QVQLQQPGAELVKPGASVKMSCKASGYTFTSYNMHWVKKTPGRGLEWIGAIYPGNGDTSYNQKFKGKATLTADKSSSTAYMQLSSLTSEDSAVYYCARSTYYGGDWYFNVWGAGTTVTVSAASTKGPSVFPLAPSSKSTSGGTAALGCLVKDYFPEPVTVSWNSGALTSGVHTFPAVLQSSGLYSLESVVTVPSSSLGTQTYICNVNHKPSNTKVDKKVEPKSCTDWSPYADQSIKVRISLKSALGDKAYEWNDNEMYLFRSSVAYAMRQYFLKVKNQMILFGEEDVRVANLKPRISFNFFVTAPKNVSDIIPRTEVEKAIRMSRSRINDAFRLNDNSLEFLGIQPTLGPPNQPPVSTSTSPTRSMAPGAVHLPQPVSTRQAVVTQEPSLTVSPGGTVTLTCGSSTGAVTTSNYANWVQKKPGQAFRGLIGGTNKRAPGTPARFSGSLLGGKAALTLSGAQPEDEAEYYCALWYSNLWVFGGGTKLTVLSSASTKGPSVFPLAPSSKSTSGGTAALGCLVKDYFPEPVTVSWNSGALTSGVHTFPAVLQSSGLYSLKSVVTVPSSSLGTQTYICNVNHKPSNTKVDKKVEPKSC

SEQ ID NO: 4668 - protein, 605 aa, synthetic construct; identical to SEQ ID NO: 728
  REGION 1..605: note = FMC63_VH-CH1/N84S/K147E/K213E/CLD201/hole/PGLALA/RF

SEQ ID NO: 4669 - protein, 605 aa, synthetic construct; identical to SEQ ID NO: 730
  REGION 1..605: note = FMC63_VH-CH1/N84S/Q39K/S183E/CLD201/hole/PGLALA/RF

SEQ ID NO: 4670 - protein, 449 aa, synthetic construct
  REGION 1..449: note = FMC63_VH-CH1/N84S/K147E/K213E/knob/PGLALA
EVKLQESGPGLVAPSQSLSVTCTVSGVSLPDYGVSWIRQPPRKGLEWLGVIWGSETTYYNSALKSRLTIIKDNSKSQVFLKMSSLQTDDTAIYYCAKHYYYGGSYAMDYWGQGTSVTVSSASTKGPSVFPLAPSSKSTSGGTAALGCLVEDYFPEPVTVSWNSGALTSGVHTFPAVLQSSGLYSLSSVVTVPSSSLGTQTYICNVNHKPSNTKVDEKVEPKSCDKTHTCPPCPAPEAAGGPSVFLFPPKPKDTLMISRTPEVTCVVVDVSHEDPEVKFNWYVDGVEVHNAKTKPREEQYNSTYRVVSVLTVLHQDWLNGKEYKCKVSNKALGAPIEKTISKAKGQPREPQVYTLPPCRDELTKNQVSLWCLVKGFYPSDIAVEWESNGQPENNYKTTPPVLDSDGSFFLYSKLTVDKSRWQQGNVFSCSVMHEALHNHYTQKSLSLSPG

SEQ ID NO: 4671 - protein, 449 aa, synthetic construct
  REGION 1..449: note = FMC63_VH-CH1/N84S/Q39K/S183E/knob/PGLALA
EVKLQESGPGLVAPSQSLSVTCTVSGVSLPDYGVSWIRKPPRKGLEWLGVIWGSETTYYNSALKSRLTIIKDNSKSQVFLKMSSLQTDDTAIYYCAKHYYYGGSYAMDYWGQGTSVTVSSASTKGPSVFPLAPSSKSTSGGTAALGCLVKDYFPEPVTVSWNSGALTSGVHTFPAVLQSSGLYSLESVVTVPSSSLGTQTYICNVNHKPSNTKVDKKVEPKSCDKTHTCPPCPAPEAAGGPSVFLFPPKPKDTLMISRTPEVTCVVVDVSHEDPEVKFNWYVDGVEVHNAKTKPREEQYNSTYRVVSVLTVLHQDWLNGKEYKCKVSNKALGAPIEKTISKAKGQPREPQVYTLPPCRDELTKNQVSLWCLVKGFYPSDIAVEWESNGQPENNYKTTPPVLDSDGSFFLYSKLTVDKSRWQQGNVFSCSVMHEALHNHYTQKSLSLSPG

SEQ ID NO: 4672 - protein, 593 aa, synthetic construct
  REGION 1..593: note = FMC63_VH-CH1/N84S/K147E/K213E/CLD201/Sp34_VK-CH1
EVKLQESGPGLVAPSQSLSVTCTVSGVSLPDYGVSWIRQPPRKGLEWLGVIWGSETTYYNSALKSRLTIIKDNSKSQVFLKMSSLQTDDTAIYYCAKHYYYGGSYAMDYWGQGTSVTVSSASTKGPSVFPLAPSSKSTSGGTAALGCLVEDYFPEPVTVSWNSGALTSGVHTFPAVLQSSGLYSLSSVVTVPSSSLGTQTYICNVNHKPSNTKVDEKVEPKSCTDWSPYADQSIKVRISLKSALGDKAYEWNDNEMYLFRSSVAYAMRQYFLKVKNQMILFGEEDVRVANLKPRISFNFFVTAPKNVSDIIPRTEVEKAIRMSRSRINDAFRLNDNSLEFLGIQPTLGPPNQPPVSTSTSPTRSMAPGAVHLPQPVSTRQAVVTQEPSLTVSPGGTVTLTCGSSTGAVTTSNYANWVQEKPGQAFRGLIGGTNKRAPGTPARFSGSLLGGKAALTLSGAQPEDEAEYYCALWYSNLWVFGGGTKLTVLSSASTKGPSVFPLAPSSKSTSGGTAALGCLVKDYFPEPVTVSWNSGALTSGVHTFPAVLQSSGLYSLSSVVTVPSSSLGTQTYICNVNHKPSNTKVDKKVEPKSC

SEQ ID NO: 4673 - protein, 593 aa, synthetic construct
  REGION 1..593: note FMC63_VH-CH1/N84S/Q39K/S183E/CLD201/Sp34_VK-CH1/Q38E/S183K
EVKLQESGPGLVAPSQSLSVTCTVSGVSLPDYGVSWIRKPPRKGLEWLGVIWGSETTYYNSALKSRLTIIKDNSKSQVFLKMSSLQTDDTAIYYCAKHYYYGGSYAMDYWGQGTSVTVSSASTKGPSVFPLAPSSKSTSGGTAALGCLVKDYFPEPVTVSWNSGALTSGVHTFPAVLQSSGLYSLESVVTVPSSSLGTQTYICNVNHKPSNTKVDKKVEPKSCTDWSPYADQSIKVRISLKSALGDKAYEWNDNEMYLFRSSVAYAMRQYFLKVKNQMILFGEEDVRVANLKPRISFNFFVTAPKNVSDIIPRTEVEKAIRMSRSRINDAFRLNDNSLEFLGIQPTLGPPNQPPVSTSTSPTRSMAPGAVHLPQPVSTRQAVVTQEPSLTVSPGGTVTLTCGSSTGAVTTSNYANWVQEKPGQAFRGLIGGTNKRAPGTPARFSGSLLGGKAALTLSGAQPEDEAEYYCALWYSNLWVFGGGTKLTVLSSASTKGPSVFPLAPSSKSTSGGTAALGCLVKDYFPEPVTVSWNSGALTSGVHTFPAVLQSSGLYSLKSVVTVPSSSLGTQTYICNVNHKPSNTKVDKKVEPKSC

SEQ ID NO: 4674 - protein, 593 aa, synthetic construct
  REGION 1..593: note FMC63_VH-CH1/N84S/Q39K/S183E/CLD201/Sp34_VK-CH1/Q38K/S183K
EVKLQESGPGLVAPSQSLSVTCTVSGVSLPDYGVSWIRKPPRKGLEWLGVIWGSETTYYNSALKSRLTIIKDNSKSQVFLKMSSLQTDDTAIYYCAKHYYYGGSYAMDYWGQGTSVTVSSASTKGPSVFPLAPSSKSTSGGTAALGCLVKDYFPEPVTVSWNSGALTSGVHTFPAVLQSSGLYSLESVVTVPSSSLGTQTYICNVNHKPSNTKVDKKVEPKSCTDWSPYADQSIKVRISLKSALGDKAYEWNDNEMYLFRSSVAYAMRQYFLKVKNQMILFGEEDVRVANLKPRISFNFFVTAPKNVSDIIPRTEVEKAIRMSRSRINDAFRLNDNSLEFLGIQPTLGPPNQPPVSTSTSPTRSMAPGAVHLPQPVSTRQAVVTQEPSLTVSPGGTVTLTCGSSTGAVTTSNYANWVQKKPGQAFRGLIGGTNKRAPGTPARFSGSLLGGKAALTLSGAQPEDEAEYYCALWYSNLWVFGGGTKLTVLSSASTKGPSVFPLAPSSKSTSGGTAALGCLVKDYFPEPVTVSWNSGALTSGVHTFPAVLQSSGLYSLKSVVTVPSSSLGTQTYICNVNHKPSNTKVDKKVEPKSC

SEQ ID NO: 4675 - protein, 604 aa, synthetic construct
  REGION 1..604: note = Ob_VH-CH1/K147E/K213E/CLD201/hole/PGLALA/RF
QVQLVQSGAEVKKPGSSVKVSCKASGYAFSYSWINWVRQAPGQGLEWMGRIFPGDGDTDYNGKFKGRVTITADKSTSTAYMELSSLRSEDTAVYYCARNVFDGYWLVYWGQGTLVTVSSASTKGPSVFPLAPSSKSTSGGTAALGCLVEDYFPEPVTVSWNSGALTSGVHTFPAVLQSSGLYSLSSVVTVPSSSLGTQTYICNVNHKPSNTKVDEKVEPKSCTDWSPYADQSIKVRISLKSALGDKAYEWNDNEMYLFRSSVAYAMRQYFLKVKNQMILFGEEDVRVANLKPRISFNFFVTAPKNVSDIIPRTEVEKAIRMSRSRINDAFRLNDNSLEFLGIQPTLGPPNQPPVSTSTSPTRSMAPGAVHLPQPVSTRDKTHTCPPCPAPEAAGGPSVFLFPPKPKDTLMISRTPEVTCVVVDVSHEDPEVKFNWYVDGVEVHNAKTKPREEQYNSTYRVVSVLTVLHQDWLNGKEYKCKVSNKALGAPIEKTISKAKGQPREPQVCTLPPSRDELTKNQVSLSCAVKGFYPSDIAVEWESNGQPENNYKTTPPVLDSDGSFFLVSKLTVDKSRWQQGNVFSCSVMHEALHNRFTQKSLSLSPG

SEQ ID NO: 4676 - protein, 604 aa, synthetic construct
  REGION 1..604: note = Ob_VH-CH1/Q39K/S183E/CLD201/hole/PGLALA/RF
QVQLVQSGAEVKKPGSSVKVSCKASGYAFSYSWINWVRKAPGQGLEWMGRIFPGDGDTDYNGKFKGRVTITADKSTSTAYMELSSLRSEDTAVYYCARNVFDGYWLVYWGQGTLVTVSSASTKGPSVFPLAPSSKSTSGGTAALGCLVKDYFPEPVTVSWNSGALTSGVHTFPAVLQSSGLYSLESVVTVPSSSLGTQTYICNVNHKPSNTKVDKKVEPKSCTDWSPYADQSIKVRISLKSALGDKAYEWNDNEMYLFRSSVAYAMRQYFLKVKNQMILFGEEDVRVANLKPRISFNFFVTAPKNVSDIIPRTEVEKAIRMSRSRINDAFRLNDNSLEFLGIQPTLGPPNQPPVSTSTSPTRSMAPGAVHLPQPVSTRDKTHTCPPCPAPEAAGGPSVFLFPPKPKDTLMISRTPEVTCVVVDVSHEDPEVKFNWYVDGVEVHNAKTKPREEQYNSTYRVVSVLTVLHQDWLNGKEYKCKVSNKALGAPIEKTISKAKGQPREPQVCTLPPSRDELTKNQVSLSCAVKGFYPSDIAVEWESNGQPENNYKTTPPVLDSDGSFFLVSKLTVDKSRWQQGNVFSCSVMHEALHNRFTQKSLSLSPG

SEQ ID NO: 4677 - protein, 448 aa, synthetic construct
  REGION 1..448: note = Ob_VH-CH1/K147E/K213E/knob/PGLALA
QVQLVQSGAEVKKPGSSVKVSCKASGYAFSYSWINWVRQAPGQGLEWMGRIFPGDGDTDYNGKFKGRVTITADKSTSTAYMELSSLRSEDTAVYYCARNVFDGYWLVYWGQGTLVTVSSASTKGPSVFPLAPSSKSTSGGTAALGCLVEDYFPEPVTVSWNSGALTSGVHTFPAVLQSSGLYSLSSVVTVPSSSLGTQTYICNVNHKPSNTKVDEKVEPKSCDKTHTCPPCPAPEAAGGPSVFLFPPKPKDTLMISRTPEVTCVVVDVSHEDPEVKFNWYVDGVEVHNAKTKPREEQYNSTYRVVSVLTVLHQDWLNGKEYKCKVSNKALGAPIEKTISKAKGQPREPQVYTLPPCRDELTKNQVSLWCLVKGFYPSDIAVEWESNGQPENNYKTTPPVLDSDGSFFLYSKLTVDKSRWQQGNVFSCSVMHEALHNHYTQKSLSLSPG

SEQ ID NO: 4678 - protein, 448 aa, synthetic construct
  REGION 1..448: note = Ob_VH-CH1/Q39K/S183E/knob/PGLALA
QVQLVQSGAEVKKPGSSVKVSCKASGYAFSYSWINWVRKAPGQGLEWMGRIFPGDGDTDYNGKFKGRVTITADKSTSTAYMELSSLRSEDTAVYYCARNVFDGYWLVYWGQGTLVTVSSASTKGPSVFPLAPSSKSTSGGTAALGCLVKDYFPEPVTVSWNSGALTSGVHTFPAVLQSSGLYSLESVVTVPSSSLGTQTYICNVNHKPSNTKVDKKVEPKSCDKTHTCPPCPAPEAAGGPSVFLFPPKPKDTLMISRTPEVTCVVVDVSHEDPEVKFNWYVDGVEVHNAKTKPREEQYNSTYRVVSVLTVLHQDWLNGKEYKCKVSNKALGAPIEKTISKAKGQPREPQVYTLPPCRDELTKNQVSLWCLVKGFYPSDIAVEWESNGQPENNYKTTPPVLDSDGSFFLYSKLTVDKSRWQQGNVFSCSVMHEALHNHYTQKSLSLSPG

SEQ ID NO: 4679 - protein, 592 aa, synthetic construct
  REGION 1..592: note = Ob_VH-CH1/K147E/K213E/CLD201/Sp34_VK-CH1
QVQLVQSGAEVKKPGSSVKVSCKASGYAFSYSWINWVRQAPGQGLEWMGRIFPGDGDTDYNGKFKGRVTITADKSTSTAYMELSSLRSEDTAVYYCARNVFDGYWLVYWGQGTLVTVSSASTKGPSVFPLAPSSKSTSGGTAALGCLVEDYFPEPVTVSWNSGALTSGVHTFPAVLQSSGLYSLSSVVTVPSSSLGTQTYICNVNHKPSNTKVDEKVEPKSCTDWSPYADQSIKVRISLKSALGDKAYEWNDNEMYLFRSSVAYAMRQYFLKVKNQMILFGEEDVRVANLKPRISFNFFVTAPKNVSDIIPRTEVEKAIRMSRSRINDAFRLNDNSLEFLGIQPTLGPPNQPPVSTSTSPTRSMAPGAVHLPQPVSTRQAVVTQEPSLTVSPGGTVTLTCGSSTGAVTTSNYANWVQEKPGQAFRGLIGGTNKRAPGTPARFSGSLLGGKAALTLSGAQPEDEAEYYCALWYSNLWVFGGGTKLTVLSSASTKGPSVFPLAPSSKSTSGGTAALGCLVKDYFPEPVTVSWNSGALTSGVHTFPAVLQSSGLYSLSSVVTVPSSSLGTQTYICNVNHKPSNTKVDKKVEPKSC

SEQ ID NO: 4680 - protein, 592 aa, synthetic construct
  REGION 1..592: note = Ob_VH-CH1/Q39K/S183E/CLD201/Sp34_VK-CH1/Q38E/S183K
QVQLVQSGAEVKKPGSSVKVSCKASGYAFSYSWINWVRKAPGQGLEWMGRIFPGDGDTDYNGKFKGRVTITADKSTSTAYMELSSLRSEDTAVYYCARNVFDGYWLVYWGQGTLVTVSSASTKGPSVFPLAPSSKSTSGGTAALGCLVKDYFPEPVTVSWNSGALTSGVHTFPAVLQSSGLYSLESVVTVPSSSLGTQTYICNVNHKPSNTKVDKKVEPKSCTDWSPYADQSIKVRISLKSALGDKAYEWNDNEMYLFRSSVAYAMRQYFLKVKNQMILFGEEDVRVANLKPRISFNFFVTAPKNVSDIIPRTEVEKAIRMSRSRINDAFRLNDNSLEFLGIQPTLGPPNQPPVSTSTSPTRSMAPGAVHLPQPVSTRQAVVTQEPSLTVSPGGTVTLTCGSSTGAVTTSNYANWVQEKPGQAFRGLIGGTNKRAPGTPARFSGSLLGGKAALTLSGAQPEDEAEYYCALWYSNLWVFGGGTKLTVLSSASTKGPSVFPLAPSSKSTSGGTAALGCLVKDYFPEPVTVSWNSGALTSGVHTFPAVLQSSGLYSLKSVVTVPSSSLGTQTYICNVNHKPSNTKVDKKVEPKSC

SEQ ID NO: 4681 - protein, 592 aa, synthetic construct
  REGION 1..592: note = Ob_VH-CH1/Q39K/S183E/CLD201/Sp34_VK-CH1/Q38K/S183K
QVQLVQSGAEVKKPGSSVKVSCKASGYAFSYSWINWVRKAPGQGLEWMGRIFPGDGDTDYNGKFKGRVTITADKSTSTAYMELSSLRSEDTAVYYCARNVFDGYWLVYWGQGTLVTVSSASTKGPSVFPLAPSSKSTSGGTAALGCLVKDYFPEPVTVSWNSGALTSGVHTFPAVLQSSGLYSLESVVTVPSSSLGTQTYICNVNHKPSNTKVDKKVEPKSCTDWSPYADQSIKVRISLKSALGDKAYEWNDNEMYLFRSSVAYAMRQYFLKVKNQMILFGEEDVRVANLKPRISFNFFVTAPKNVSDIIPRTEVEKAIRMSRSRINDAFRLNDNSLEFLGIQPTLGPPNQPPVSTSTSPTRSMAPGAVHLPQPVSTRQAVVTQEPSLTVSPGGTVTLTCGSSTGAVTTSNYANWVQKKPGQAFRGLIGGTNKRAPGTPARFSGSLLGGKAALTLSGAQPEDEAEYYCALWYSNLWVFGGGTKLTVLSSASTKGPSVFPLAPSSKSTSGGTAALGCLVKDYFPEPVTVSWNSGALTSGVHTFPAVLQSSGLYSLKSVVTVPSSSLGTQTYICNVNHKPSNTKVDKKVEPKSC

SEQ ID NO: 4682 - protein, 459 aa, synthetic construct
  REGION 1..459: note = Sp34_VK-CH1/knob/PGLALA
MEWSWVFLFFLSVTTGVHSQAVVTQEPSLTVSPGGTVTLTCGSSTGAVTTSNYANWVQEKPGQAFRGLIGGTNKRAPGTPARFSGSLLGGKAALTLSGAQPEDEAEYYCALWYSNLWVFGGGTKLTVLSSASTKGPSVFPLAPSSKSTSGGTAALGCLVKDYFPEPVTVSWNSGALTSGVHTFPAVLQSSGLYSLSSVVTVPSSSLGTQTYICNVNHKPSNTKVDKKVEPKSCDKTHTCPPCPAPEAAGGPSVFLFPPKPKDTLMISRTPEVTCVVVDVSHEDPEVKFNWYVDGVEVHNAKTKPREEQYNSTYRVVSVLTVLHQDWLNGKEYKCKVSNKALGAPIEKTISKAKGQPREPQVYTLPPCRDELTKNQVSLWCLVKGFYPSDIAVEWESNGQPENNYKTTPPVLDSDGSFFLYSKLTVDKSRWQQGNVFSCSVMHEALHNHYTQKSLSLSPG

SEQ ID NO: 4683 - protein, 459 aa, synthetic construct
  REGION 1..459: note = Sp34_VK-CH1/knob/Q38E/S183K/PGLALA
MEWSWVFLFFLSVTTGVHSQAVVTQEPSLTVSPGGTVTLTCGSSTGAVTTSNYANWVQEKPGQAFRGLIGGTNKRAPGTPARFSGSLLGGKAALTLSGAQPEDEAEYYCALWYSNLWVFGGGTKLTVLSSASTKGPSVFPLAPSSKSTSGGTAALGCLVKDYFPEPVTVSWNSGALTSGVHTFPAVLQSSGLYSLKSVVTVPSSSLGTQTYICNVNHKPSNTKVDKKVEPKSCDKTHTCPPCPAPEAAGGPSVFLFPPKPKDTLMISRTPEVTCVVVDVSHEDPEVKFNWYVDGVEVHNAKTKPREEQYNSTYRVVSVLTVLHQDWLNGKEYKCKVSNKALGAPIEKTISKAKGQPREPQVYTLPPCRDELTKNQVSLWCLVKGFYPSDIAVEWESNGQPENNYKTTPPVLDSDGSFFLYSKLTVDKSRWQQGNVFSCSVMHEALHNHYTQKSLSLSPG

SEQ ID NO: 4684 - protein, 459 aa, synthetic construct
  REGION 1..459: note = Sp34_VK-CH1/knob/Q38K/S183K/PGLALA
MEWSWVFLFFLSVTTGVHSQAVVTQEPSLTVSPGGTVTLTCGSSTGAVTTSNYANWVQKKPGQAFRGLIGGTNKRAPGTPARFSGSLLGGKAALTLSGAQPEDEAEYYCALWYSNLWVFGGGTKLTVLSSASTKGPSVFPLAPSSKSTSGGTAALGCLVKDYFPEPVTVSWNSGALTSGVHTFPAVLQSSGLYSLKSVVTVPSSSLGTQTYICNVNHKPSNTKVDKKVEPKSCDKTHTCPPCPAPEAAGGPSVFLFPPKPKDTLMISRTPEVTCVVVDVSHEDPEVKFNWYVDGVEVHNAKTKPREEQYNSTYRVVSVLTVLHQDWLNGKEYKCKVSNKALGAPIEKTISKAKGQPREPQVYTLPPCRDELTKNQVSLWCLVKGFYPSDIAVEWESNGQPENNYKTTPPVLDSDGSFFLYSKLTVDKSRWQQGNVFSCSVMHEALHNHYTQKSLSLSPG

SEQ ID NO: 4685 - protein, 213 aa, synthetic construct; identical to SEQ ID NO: 733
  REGION 1..213: note = R_VK-CK/E123R/Q124K

SEQ ID NO: 4686 - protein, 232 aa, synthetic construct; identical to SEQ ID NO: 697
  REGION 1..232: note = Sp34_VH-CK/N84S

SEQ ID NO: 4687 - protein, 213 aa, synthetic construct; identical to SEQ ID NO: 735
  REGION 1..213: note = R_VK-CK/Q38E/V133K

SEQ ID NO: 4688 - protein, 232 aa, synthetic construct; identical to SEQ ID NO: 698
  REGION 1..232: note = Sp34_VH-CK/N84S/Q39K/V133E

SEQ ID NO: 4689 - protein, 232 aa, synthetic construct; identical to SEQ ID NO: 699
  REGION 1..232: note = Sp34_VH-CK/N84S/Q39E/V133E

SEQ ID NO: 4690 - protein, 214 aa, synthetic construct; identical to SEQ ID NO: 738
  REGION 1..214: note = FMC63_VK-CK/E123R/Q124K

SEQ ID NO: 4691 - protein, 214 aa, synthetic construct; identical to SEQ ID NO: 740
  REGION 1..214: note = FMC63_VK-CK/Q38E/V133K

SEQ ID NO: 4692 - protein, 219 aa, synthetic construct; identical to SEQ ID NO: 38
  REGION 1..219: note = Ob_VK-CK/E123R/Q124K

SEQ ID NO: 4693 - protein, 219 aa, synthetic construct
  REGION 1..219: note = Ob_VK-CK/Q38E/V133K
DIVMTQTPLSLPVTPGEPASISCRSSKSLLHSNGITYLYWYLEKPGQSPQLLIYQMSNLVSGVPDRFSGSGSGTDFTLKISRVEAEDVGVYYCAQNLELPYTFGGGTKVEIKRTVAAPSVFIFPPSDEQLKSGTASVKCLLNNFYPREAKVQWKVDNALQSGNSQESVTEQDSKDSTYSLSSTLTLSKADYEKHKVYACEVTHQGLSSPVTKSFNRGEC

SEQ ID NO: 4694 - protein, 221 aa, synthetic construct; identical to SEQ ID NO: 706
  REGION 1..221: note = Fc6/knob/PGLALA

SEQ ID NO: 4695 - protein, 606 aa, synthetic construct; identical to SEQ ID NO: 709
  REGION 1..606: note = R_VH-CH1/Q39K/S183E/CLD201/hole/RF

SEQ ID NO: 4696 - protein, 438 aa, synthetic construct; identical to SEQ ID NO: 710
  REGION 1..438: note = FMC63_VK-x-CH1/Q38E/S183K/knob

SEQ ID NO: 4697 - protein, 438 aa, synthetic construct; identical to SEQ ID NO: 711
  REGION 1..438: note = FMC63_VK-x-CH1/Q38K/S183K/knob

SEQ ID NO: 4698 - protein, 605 aa, synthetic construct; identical to SEQ ID NO: 714
  REGION 1..605: note = FMC63_VH-CH1/N84S/Q39K/S183E/CLD201/hole/RF

SEQ ID NO: 4699 - protein, 437 aa, synthetic construct; identical to SEQ ID NO: 715
  REGION 1..437: note = R_VK-x-CH1/Q38E/S183K/knob

SEQ ID NO: 4700 - protein, 437 aa, synthetic construct; identical to SEQ ID NO: 716
  REGION 1..437: note = R_VK-x-CH1/Q38K/S183K/knob

SEQ ID NO: 4701 - protein, 606 aa, synthetic construct
  REGION 1..606: note = R_VH-CH1/K147E/K213E/CLD201/hole/SSDA/RF
QVQLQQPGAELVKPGASVKMSCKASGYTFTSYNMHWVKQTPGRGLEWIGAIYPGNGDTSYNQKFKGKATLTADKSSSTAYMQLSSLTSEDSAVYYCARSTYYGGDWYFNVWGAGTTVTVSAASTKGPSVFPLAPSSKSTSGGTAALGCLVEDYFPEPVTVSWNSGALTSGVHTFPAVLQSSGLYSLSSVVTVPSSSLGTQTYICNVNHKPSNTKVDEKVEPKSCTDWSPYADQSIKVRISLKSALGDKAYEWNDNEMYLFRSSVAYAMRQYFLKVKNQMILFGEEDVRVANLKPRISFNFFVTAPKNVSDIIPRTEVEKAIRMSRSRINDAFRLNDNSLEFLGIQPTLGPPNQPPVSTSTSPTRSMAPGAVHLPQPVSTRDKTHTCPPCPAPELLGGPDVFLFPPKPKDTLMISRTPEVTCVVVDVSHEDPEVKFNWYVDGVEVHNAKTKPREEQYNATYRVVSVLTVLHQDWLNGKEYKCKVSNKALPAPIEKTISKAKGQPREPQVCTLPPSRDELTKNQVSLSCAVKGFYPSDIAVEWESNGQPENNYKTTPPVLDSDGSFFLVSKLTVDKSRWQQGNVFSCSVMHEALHNRFTQKSLSLSPG

SEQ ID NO: 4702 - protein, 438 aa, synthetic construct
  REGION 1..438: note = FMC63_VK-x-CH1/knob/AILE
DIQMTQTTSSLSASLGDRVTISCRASQDISKYLNWYQQKPDGTVKLLIYHTSRLHSGVPSRFSGSGSGTDYSLTISNLEQEDIATYFCQQGNTLPYTFGGGTKVEIKSSASTKGPSVFPLAPSSKSTSGGTAALGCLVKDYFPEPVTVSWNSGALTSGVHTFPAVLQSSGLYSLSSVVTVPSSSLGTQTYICNVNHKPSNTKVDKKVEPKSCDKTHTCPPCPAPELLGGPSVFLFPPKPKDTLMISRTPEVTCVVVDVSHEDPEVKFNWYVDGVEVHNAKTKPREEQYNSTYRVVSVLTVLHQDWLNGKEYKCKVSNKALPLPEEKTISKAKGQPREPQVYTLPPCRDELTKNQVSLWCLVKGFYPSDIAVEWESNGQPENNYKTTPPVLDSDGSFFLYSKLTVDKSRWQQGNVFSCSVMHEALHNHYTQKSLSLSPG

SEQ ID NO: 4703 - protein, 606 aa, synthetic construct
  REGION 1..606: note = R_VH-CH1/Q39K/S183E/CLD201/hole/SSDA/RF
QVQLQQPGAELVKPGASVKMSCKASGYTFTSYNMHWVKKTPGRGLEWIGAIYPGNGDTSYNQKFKGKATLTADKSSSTAYMQLSSLTSEDSAVYYCARSTYYGGDWYFNVWGAGTTVTVSAASTKGPSVFPLAPSSKSTSGGTAALGCLVKDYFPEPVTVSWNSGALTSGVHTFPAVLQSSGLYSLESVVTVPSSSLGTQTYICNVNHKPSNTKVDKKVEPKSCTDWSPYADQSIKVRISLKSALGDKAYEWNDNEMYLFRSSVAYAMRQYFLKVKNQMILFGEEDVRVANLKPRISFNFFVTAPKNVSDIIPRTEVEKAIRMSRSRINDAFRLNDNSLEFLGIQPTLGPPNQPPVSTSTSPTRSMAPGAVHLPQPVSTRDKTHTCPPCPAPELLGGPDVFLFPPKPKDTLMISRTPEVTCVVVDVSHEDPEVKFNWYVDGVEVHNAKTKPREEQYNATYRVVSVLTVLHQDWLNGKEYKCKVSNKALPAPIEKTISKAKGQPREPQVCTLPPSRDELTKNQVSLSCAVKGFYPSDIAVEWESNGQPENNYKTTPPVLDSDGSFFLVSKLTVDKSRWQQGNVFSCSVMHEALHNRFTQKSLSLSPG

SEQ ID NO: 4704 - protein, 438 aa, synthetic construct
  REGION 1..438: note = FMC63_VK-x-CH1/Q38E/S183K/knob/AILE
DIQMTQTTSSLSASLGDRVTISCRASQDISKYLNWYQEKPDGTVKLLIYHTSRLHSGVPSRFSGSGSGTDYSLTISNLEQEDIATYFCQQGNTLPYTFGGGTKVEIKSSASTKGPSVFPLAPSSKSTSGGTAALGCLVKDYFPEPVTVSWNSGALTSGVHTFPAVLQSSGLYSLKSVVTVPSSSLGTQTYICNVNHKPSNTKVDKKVEPKSCDKTHTCPPCPAPELLGGPSVFLFPPKPKDTLMISRTPEVTCVVVDVSHEDPEVKFNWYVDGVEVHNAKTKPREEQYNSTYRVVSVLTVLHQDWLNGKEYKCKVSNKALPLPEEKTISKAKGQPREPQVYTLPPCRDELTKNQVSLWCLVKGFYPSDIAVEWESNGQPENNYKTTPPVLDSDGSFFLYSKLTVDKSRWQQGNVFSCSVMHEALHNHYTQKSLSLSPG

SEQ ID NO: 4705 - protein, 438 aa, synthetic construct
  REGION 1..438: note = FMC63_VK-x-CH1/Q38K/S183K/knob/AILE
DIQMTQTTSSLSASLGDRVTISCRASQDISKYLNWYQKKPDGTVKLLIYHTSRLHSGVPSRFSGSGSGTDYSLTISNLEQEDIATYFCQQGNTLPYTFGGGTKVEIKSSASTKGPSVFPLAPSSKSTSGGTAALGCLVKDYFPEPVTVSWNSGALTSGVHTFPAVLQSSGLYSLKSVVTVPSSSLGTQTYICNVNHKPSNTKVDKKVEPKSCDKTHTCPPCPAPELLGGPSVFLFPPKPKDTLMISRTPEVTCVVVDVSHEDPEVKFNWYVDGVEVHNAKTKPREEQYNSTYRVVSVLTVLHQDWLNGKEYKCKVSNKALPLPEEKTISKAKGQPREPQVYTLPPCRDELTKNQVSLWCLVKGFYPSDIAVEWESNGQPENNYKTTPPVLDSDGSFFLYSKLTVDKSRWQQGNVFSCSVMHEALHNHYTQKSLSLSPG

SEQ ID NO: 4706 - protein, 605 aa, synthetic construct
  REGION 1..605: note = FMC63_VH-CH1/N84S/K147E/K213E/CLD201/hole/SSDA/RF
EVKLQESGPGLVAPSQSLSVTCTVSGVSLPDYGVSWIRQPPRKGLEWLGVIWGSETTYYNSALKSRLTIIKDNSKSQVFLKMSSLQTDDTAIYYCAKHYYYGGSYAMDYWGQGTSVTVSSASTKGPSVFPLAPSSKSTSGGTAALGCLVEDYFPEPVTVSWNSGALTSGVHTFPAVLQSSGLYSLSSVVTVPSSSLGTQTYICNVNHKPSNTKVDEKVEPKSCTDWSPYADQSIKVRISLKSALGDKAYEWNDNEMYLFRSSVAYAMRQYFLKVKNQMILFGEEDVRVANLKPRISFNFFVTAPKNVSDIIPRTEVEKAIRMSRSRINDAFRLNDNSLEFLGIQPTLGPPNQPPVSTSTSPTRSMAPGAVHLPQPVSTRDKTHTCPPCPAPELLGGPDVFLFPPKPKDTLMISRTPEVTCVVVDVSHEDPEVKFNWYVDGVEVHNAKTKPREEQYNATYRVVSVLTVLHQDWLNGKEYKCKVSNKALPAPIEKTISKAKGQPREPQVCTLPPSRDELTKNQVSLSCAVKGFYPSDIAVEWESNGQPENNYKTTPPVLDSDGSFFLVSKLTVDKSRWQQGNVFSCSVMHEALHNRFTQKSLSLSPG

SEQ ID NO: 4707 - protein, 437 aa, synthetic construct
  REGION 1..437: note = R_VK-x-CH1/knob/AILE
QIVLSQSPAILSASPGEKVTMTCRASSSVSYIHWFQQKPGSSPKPWIYATSNLASGVPVRFSGSGSGTSYSLTISRVEAEDAATYYCQQWTSNPPTFGGGTKVEIKSSASTKGPSVFPLAPSSKSTSGGTAALGCLVKDYFPEPVTVSWNSGALTSGVHTFPAVLQSSGLYSLSSVVTVPSSSLGTQTYICNVNHKPSNTKVDKKVEPKSCDKTHTCPPCPAPELLGGPSVFLFPPKPKDTLMISRTPEVTCVVVDVSHEDPEVKFNWYVDGVEVHNAKTKPREEQYNSTYRVVSVLTVLHQDWLNGKEYKCKVSNKALPLPEEKTISKAKGQPREPQVYTLPPCRDELTKNQVSLWCLVKGFYPSDIAVEWESNGQPENNYKTTPPVLDSDGSFFLYSKLTVDKSRWQQGNVFSCSVMHEALHNHYTQKSLSLSPG

SEQ ID NO: 4708 - protein, 605 aa, synthetic construct
  REGION 1..605: note = FMC63_VH-CH1/N84S/Q39K/S183E/CLD201/hole/SSDA/RF
EVKLQESGPGLVAPSQSLSVTCTVSGVSLPDYGVSWIRKPPRKGLEWLGVIWGSETTYYNSALKSRLTIIKDNSKSQVFLKMSSLQTDDTAIYYCAKHYYYGGSYAMDYWGQGTSVTVSSASTKGPSVFPLAPSSKSTSGGTAALGCLVKDYFPEPVTVSWNSGALTSGVHTFPAVLQSSGLYSLESVVTVPSSSLGTQTYICNVNHKPSNTKVDKKVEPKSCTDWSPYADQSIKVRISLKSALGDKAYEWNDNEMYLFRSSVAYAMRQYFLKVKNQMILFGEEDVRVANLKPRISFNFFVTAPKNVSDIIPRTEVEKAIRMSRSRINDAFRLNDNSLEFLGIQPTLGPPNQPPVSTSTSPTRSMAPGAVHLPQPVSTRDKTHTCPPCPAPELLGGPDVFLFPPKPKDTLMISRTPEVTCVVVDVSHEDPEVKFNWYVDGVEVHNAKTKPREEQYNATYRVVSVLTVLHQDWLNGKEYKCKVSNKALPAPIEKTISKAKGQPREPQVCTLPPSRDELTKNQVSLSCAVKGFYPSDIAVEWESNGQPENNYKTTPPVLDSDGSFFLVSKLTVDKSRWQQGNVFSCSVMHEALHNRFTQKSLSLSPG

SEQ ID NO: 4709 - protein, 437 aa, synthetic construct
  REGION 1..437: note = R_VK-x-CH1/Q38E/S183K/knob/AILE
QIVLSQSPAILSASPGEKVTMTCRASSSVSYIHWFQEKPGSSPKPWIYATSNLASGVPVRFSGSGSGTSYSLTISRVEAEDAATYYCQQWTSNPPTFGGGTKVEIKSSASTKGPSVFPLAPSSKSTSGGTAALGCLVKDYFPEPVTVSWNSGALTSGVHTFPAVLQSSGLYSLKSVVTVPSSSLGTQTYICNVNHKPSNTKVDKKVEPKSCDKTHTCPPCPAPELLGGPSVFLFPPKPKDTLMISRTPEVTCVVVDVSHEDPEVKFNWYVDGVEVHNAKTKPREEQYNSTYRVVSVLTVLHQDWLNGKEYKCKVSNKALPLPEEKTISKAKGQPREPQVYTLPPCRDELTKNQVSLWCLVKGFYPSDIAVEWESNGQPENNYKTTPPVLDSDGSFFLYSKLTVDKSRWQQGNVFSCSVMHEALHNHYTQKSLSLSPG

SEQ ID NO: 4710 - protein, 437 aa, synthetic construct
  REGION 1..437: note = R_VK-x-CH1/Q38K/S183K/knob/AILE
QIVLSQSPAILSASPGEKVTMTCRASSSVSYIHWFQKKPGSSPKPWIYATSNLASGVPVRFSGSGSGTSYSLTISRVEAEDAATYYCQQWTSNPPTFGGGTKVEIKSSASTKGPSVFPLAPSSKSTSGGTAALGCLVKDYFPEPVTVSWNSGALTSGVHTFPAVLQSSGLYSLKSVVTVPSSSLGTQTYICNVNHKPSNTKVDKKVEPKSCDKTHTCPPCPAPELLGGPSVFLFPPKPKDTLMISRTPEVTCVVVDVSHEDPEVKFNWYVDGVEVHNAKTKPREEQYNSTYRVVSVLTVLHQDWLNGKEYKCKVSNKALPLPEEKTISKAKGQPREPQVYTLPPCRDELTKNQVSLWCLVKGFYPSDIAVEWESNGQPENNYKTTPPVLDSDGSFFLYSKLTVDKSRWQQGNVFSCSVMHEALHNHYTQKSLSLSPG

SEQ ID NO: 4711 - protein, 606 aa, synthetic construct
  REGION 1..606: note = R_VH-CH1/K147E/K213E/CLD201/hole/AILE/RF
QVQLQQPGAELVKPGASVKMSCKASGYTFTSYNMHWVKQTPGRGLEWIGAIYPGNGDTSYNQKFKGKATLTADKSSSTAYMQLSSLTSEDSAVYYCARSTYYGGDWYFNVWGAGTTVTVSAASTKGPSVFPLAPSSKSTSGGTAALGCLVEDYFPEPVTVSWNSGALTSGVHTFPAVLQSSGLYSLSSVVTVPSSSLGTQTYICNVNHKPSNTKVDEKVEPKSCTDWSPYADQSIKVRISLKSALGDKAYEWNDNEMYLFRSSVAYAMRQYFLKVKNQMILFGEEDVRVANLKPRISFNFFVTAPKNVSDIIPRTEVEKAIRMSRSRINDAFRLNDNSLEFLGIQPTLGPPNQPPVSTSTSPTRSMAPGAVHLPQPVSTRDKTHTCPPCPAPELLGGPSVFLFPPKPKDTLMISRTPEVTCVVVDVSHEDPEVKFNWYVDGVEVHNAKTKPREEQYNSTYRVVSVLTVLHQDWLNGKEYKCKVSNKALPLPEEKTISKAKGQPREPQVCTLPPSRDELTKNQVSLSCAVKGFYPSDIAVEWESNGQPENNYKTTPPVLDSDGSFFLVSKLTVDKSRWQQGNVFSCSVMHEALHNRFTQKSLSLSPG

SEQ ID NO: 4712 - protein, 438 aa, synthetic construct
  REGION 1..438: note = FMC63_VK-x-CH1/knob/SSDA
DIQMTQTTSSLSASLGDRVTISCRASQDISKYLNWYQQKPDGTVKLLIYHTSRLHSGVPSRFSGSGSGTDYSLTISNLEQEDIATYFCQQGNTLPYTFGGGTKVEIKSSASTKGPSVFPLAPSSKSTSGGTAALGCLVKDYFPEPVTVSWNSGALTSGVHTFPAVLQSSGLYSLSSVVTVPSSSLGTQTYICNVNHKPSNTKVDKKVEPKSCDKTHTCPPCPAPELLGGPDVFLFPPKPKDTLMISRTPEVTCVVVDVSHEDPEVKFNWYVDGVEVHNAKTKPREEQYNATYRVVSVLTVLHQDWLNGKEYKCKVSNKALPAPIEKTISKAKGQPREPQVYTLPPCRDELTKNQVSLWCLVKGFYPSDIAVEWESNGQPENNYKTTPPVLDSDGSFFLYSKLTVDKSRWQQGNVFSCSVMHEALHNHYTQKSLSLSPG

SEQ ID NO: 4713 - protein, 606 aa, synthetic construct
  REGION 1..606: note = R_VH-CH1/Q39K/S183E/CLD201/hole/AILE/RF
QVQLQQPGAELVKPGASVKMSCKASGYTFTSYNMHWVKKTPGRGLEWIGAIYPGNGDTSYNQKFKGKATLTADKSSSTAYMQLSSLTSEDSAVYYCARSTYYGGDWYFNVWGAGTTVTVSAASTKGPSVFPLAPSSKSTSGGTAALGCLVKDYFPEPVTVSWNSGALTSGVHTFPAVLQSSGLYSLESVVTVPSSSLGTQTYICNVNHKPSNTKVDKKVEPKSCTDWSPYADQSIKVRISLKSALGDKAYEWNDNEMYLFRSSVAYAMRQYFLKVKNQMILFGEEDVRVANLKPRISFNFFVTAPKNVSDIIPRTEVEKAIRMSRSRINDAFRLNDNSLEFLGIQPTLGPPNQPPVSTSTSPTRSMAPGAVHLPQPVSTRDKTHTCPPCPAPELLGGPSVFLFPPKPKDTLMISRTPEVTCVVVDVSHEDPEVKFNWYVDGVEVHNAKTKPREEQYNSTYRVVSVLTVLHQDWLNGKEYKCKVSNKALPLPEEKTISKAKGQPREPQVCTLPPSRDELTKNQVSLSCAVKGFYPSDIAVEWESNGQPENNYKTTPPVLDSDGSFFLVSKLTVDKSRWQQGNVFSCSVMHEALHNRFTQKSLSLSPG

SEQ ID NO: 4714 - protein, 438 aa, synthetic construct
  REGION 1..438: note = FMC63_VK-x-CH1/Q38E/S183K/knob/SSDA
DIQMTQTTSSLSASLGDRVTISCRASQDISKYLNWYQEKPDGTVKLLIYHTSRLHSGVPSRFSGSGSGTDYSLTISNLEQEDIATYFCQQGNTLPYTFGGGTKVEIKSSASTKGPSVFPLAPSSKSTSGGTAALGCLVKDYFPEPVTVSWNSGALTSGVHTFPAVLQSSGLYSLKSVVTVPSSSLGTQTYICNVNHKPSNTKVDKKVEPKSCDKTHTCPPCPAPELLGGPDVFLFPPKPKDTLMISRTPEVTCVVVDVSHEDPEVKFNWYVDGVEVHNAKTKPREEQYNATYRVVSVLTVLHQDWLNGKEYKCKVSNKALPAPIEKTISKAKGQPREPQVYTLPPCRDELTKNQVSLWCLVKGFYPSDIAVEWESNGQPENNYKTTPPVLDSDGSFFLYSKLTVDKSRWQQGNVFSCSVMHEALHNHYTQKSLSLSPG

SEQ ID NO: 4715 - protein, 438 aa, synthetic construct
  REGION 1..438: note = FMC63_VK-x-CH1/Q38K/S183K/knob/SSDA
DIQMTQTTSSLSASLGDRVTISCRASQDISKYLNWYQKKPDGTVKLLIYHTSRLHSGVPSRFSGSGSGTDYSLTISNLEQEDIATYFCQQGNTLPYTFGGGTKVEIKSSASTKGPSVFPLAPSSKSTSGGTAALGCLVKDYFPEPVTVSWNSGALTSGVHTFPAVLQSSGLYSLKSVVTVPSSSLGTQTYICNVNHKPSNTKVDKKVEPKSCDKTHTCPPCPAPELLGGPDVFLFPPKPKDTLMISRTPEVTCVVVDVSHEDPEVKFNWYVDGVEVHNAKTKPREEQYNATYRVVSVLTVLHQDWLNGKEYKCKVSNKALPAPIEKTISKAKGQPREPQVYTLPPCRDELTKNQVSLWCLVKGFYPSDIAVEWESNGQPENNYKTTPPVLDSDGSFFLYSKLTVDKSRWQQGNVFSCSVMHEALHNHYTQKSLSLSPG

SEQ ID NO: 4716 - protein, 605 aa, synthetic construct
  REGION 1..605: note = FMC63_VH-CH1/N84S/K147E/K213E/CLD201/hole/AILE/RF
EVKLQESGPGLVAPSQSLSVTCTVSGVSLPDYGVSWIRQPPRKGLEWLGVIWGSETTYYNSALKSRLTIIKDNSKSQVFLKMSSLQTDDTAIYYCAKHYYYGGSYAMDYWGQGTSVTVSSASTKGPSVFPLAPSSKSTSGGTAALGCLVEDYFPEPVTVSWNSGALTSGVHTFPAVLQSSGLYSLSSVVTVPSSSLGTQTYICNVNHKPSNTKVDEKVEPKSCTDWSPYADQSIKVRISLKSALGDKAYEWNDNEMYLFRSSVAYAMRQYFLKVKNQMILFGEEDVRVANLKPRISFNFFVTAPKNVSDIIPRTEVEKAIRMSRSRINDAFRLNDNSLEFLGIQPTLGPPNQPPVSTSTSPTRSMAPGAVHLPQPVSTRDKTHTCPPCPAPELLGGPSVFLFPPKPKDTLMISRTPEVTCVVVDVSHEDPEVKFNWYVDGVEVHNAKTKPREEQYNSTYRVVSVLTVLHQDWLNGKEYKCKVSNKALPLPEEKTISKAKGQPREPQVCTLPPSRDELTKNQVSLSCAVKGFYPSDIAVEWESNGQPENNYKTTPPVLDSDGSFFLVSKLTVDKSRWQQGNVFSCSVMHEALHNRFTQKSLSLSPG

SEQ ID NO: 4717 - protein, 437 aa, synthetic construct
  REGION 1..437: note = R_VK-x-CH1/knob/SSDA
QIVLSQSPAILSASPGEKVTMTCRASSSVSYIHWFQQKPGSSPKPWIYATSNLASGVPVRFSGSGSGTSYSLTISRVEAEDAATYYCQQWTSNPPTFGGGTKVEIKSSASTKGPSVFPLAPSSKSTSGGTAALGCLVKDYFPEPVTVSWNSGALTSGVHTFPAVLQSSGLYSLSSVVTVPSSSLGTQTYICNVNHKPSNTKVDKKVEPKSCDKTHTCPPCPAPELLGGPDVFLFPPKPKDTLMISRTPEVTCVVVDVSHEDPEVKFNWYVDGVEVHNAKTKPREEQYNATYRVVSVLTVLHQDWLNGKEYKCKVSNKALPAPIEKTISKAKGQPREPQVYTLPPCRDELTKNQVSLWCLVKGFYPSDIAVEWESNGQPENNYKTTPPVLDSDGSFFLYSKLTVDKSRWQQGNVFSCSVMHEALHNHYTQKSLSLSPG

SEQ ID NO: 4718 - protein, 605 aa, synthetic construct
  REGION 1..605: note = FMC63_VH-CH1/N84S/Q39K/S183E/CLD201/hole/AILE/RF
EVKLQESGPGLVAPSQSLSVTCTVSGVSLPDYGVSWIRKPPRKGLEWLGVIWGSETTYYNSALKSRLTIIKDNSKSQVFLKMSSLQTDDTAIYYCAKHYYYGGSYAMDYWGQGTSVTVSSASTKGPSVFPLAPSSKSTSGGTAALGCLVKDYFPEPVTVSWNSGALTSGVHTFPAVLQSSGLYSLESVVTVPSSSLGTQTYICNVNHKPSNTKVDKKVEPKSCTDWSPYADQSIKVRISLKSALGDKAYEWNDNEMYLFRSSVAYAMRQYFLKVKNQMILFGEEDVRVANLKPRISFNFFVTAPKNVSDIIPRTEVEKAIRMSRSRINDAFRLNDNSLEFLGIQPTLGPPNQPPVSTSTSPTRSMAPGAVHLPQPVSTRDKTHTCPPCPAPELLGGPSVFLFPPKPKDTLMISRTPEVTCVVVDVSHEDPEVKFNWYVDGVEVHNAKTKPREEQYNSTYRVVSVLTVLHQDWLNGKEYKCKVSNKALPLPEEKTISKAKGQPREPQVCTLPPSRDELTKNQVSLSCAVKGFYPSDIAVEWESNGQPENNYKTTPPVLDSDGSFFLVSKLTVDKSRWQQGNVFSCSVMHEALHNRFTQKSLSLSPG

SEQ ID NO: 4719 - protein, 437 aa, synthetic construct
  REGION 1..437: note = R_VK-x-CH1/Q38E/S183K/knob/SSDA
QIVLSQSPAILSASPGEKVTMTCRASSSVSYIHWFQEKPGSSPKPWIYATSNLASGVPVRFSGSGSGTSYSLTISRVEAEDAATYYCQQWTSNPPTFGGGTKVEIKSSASTKGPSVFPLAPSSKSTSGGTAALGCLVKDYFPEPVTVSWNSGALTSGVHTFPAVLQSSGLYSLKSVVTVPSSSLGTQTYICNVNHKPSNTKVDKKVEPKSCDKTHTCPPCPAPELLGGPDVFLFPPKPKDTLMISRTPEVTCVVVDVSHEDPEVKFNWYVDGVEVHNAKTKPREEQYNATYRVVSVLTVLHQDWLNGKEYKCKVSNKALPAPIEKTISKAKGQPREPQVYTLPPCRDELTKNQVSLWCLVKGFYPSDIAVEWESNGQPENNYKTTPPVLDSDGSFFLYSKLTVDKSRWQQGNVFSCSVMHEALHNHYTQKSLSLSPG

SEQ ID NO: 4720 - protein, 437 aa, synthetic construct
  REGION 1..437: note = R_VK-x-CH1/Q38K/S183K/knob/SSDA
QIVLSQSPAILSASPGEKVTMTCRASSSVSYIHWFQKKPGSSPKPWIYATSNLASGVPVRFSGSGSGTSYSLTISRVEAEDAATYYCQQWTSNPPTFGGGTKVEIKSSASTKGPSVFPLAPSSKSTSGGTAALGCLVKDYFPEPVTVSWNSGALTSGVHTFPAVLQSSGLYSLKSVVTVPSSSLGTQTYICNVNHKPSNTKVDKKVEPKSCDKTHTCPPCPAPELLGGPDVFLFPPKPKDTLMISRTPEVTCVVVDVSHEDPEVKFNWYVDGVEVHNAKTKPREEQYNATYRVVSVLTVLHQDWLNGKEYKCKVSNKALPAPIEKTISKAKGQPREPQVYTLPPCRDELTKNQVSLWCLVKGFYPSDIAVEWESNGQPENNYKTTPPVLDSDGSFFLYSKLTVDKSRWQQGNVFSCSVMHEALHNHYTQKSLSLSPG

SEQ ID NO: 4721 - protein, 606 aa, synthetic construct
  REGION 1..606: note = R_VH-CH1/K147E/K213E/CLD201/hole/SIDE/RF
QVQLQQPGAELVKPGASVKMSCKASGYTFTSYNMHWVKQTPGRGLEWIGAIYPGNGDTSYNQKFKGKATLTADKSSSTAYMQLSSLTSEDSAVYYCARSTYYGGDWYFNVWGAGTTVTVSAASTKGPSVFPLAPSSKSTSGGTAALGCLVEDYFPEPVTVSWNSGALTSGVHTFPAVLQSSGLYSLSSVVTVPSSSLGTQTYICNVNHKPSNTKVDEKVEPKSCTDWSPYADQSIKVRISLKSALGDKAYEWNDNEMYLFRSSVAYAMRQYFLKVKNQMILFGEEDVRVANLKPRISFNFFVTAPKNVSDIIPRTEVEKAIRMSRSRINDAFRLNDNSLEFLGIQPTLGPPNQPPVSTSTSPTRSMAPGAVHLPQPVSTRDKTHTCPPCPAPELLGGPDVFLFPPKPKDTLMISRTPEVTCVVVDVSHEDPEVKFNWYVDGVEVHNAKTKPREEQYNSTYRVVSVLTVLHQDWLNGKEYKCKVSNKALPAPEEKTISKAKGQPREPQVCTLPPSRDELTKNQVSLSCAVKGFYPSDIAVEWESNGQPENNYKTTPPVLDSDGSFFLVSKLTVDKSRWQQGNVFSCSVMHEALHNRFTQKSLSLSPG

SEQ ID NO: 4722 - protein, 438 aa, synthetic construct
  REGION 1..438: note = FMC63_VK-x-CH1/knob/SIDE
DIQMTQTTSSLSASLGDRVTISCRASQDISKYLNWYQQKPDGTVKLLIYHTSRLHSGVPSRFSGSGSGTDYSLTISNLEQEDIATYFCQQGNTLPYTFGGGTKVEIKSSASTKGPSVFPLAPSSKSTSGGTAALGCLVKDYFPEPVTVSWNSGALTSGVHTFPAVLQSSGLYSLSSVVTVPSSSLGTQTYICNVNHKPSNTKVDKKVEPKSCDKTHTCPPCPAPELLGGPDVFLFPPKPKDTLMISRTPEVTCVVVDVSHEDPEVKFNWYVDGVEVHNAKTKPREEQYNSTYRVVSVLTVLHQDWLNGKEYKCKVSNKALPAPEEKTISKAKGQPREPQVYTLPPCRDELTKNQVSLWCLVKGFYPSDIAVEWESNGQPENNYKTTPPVLDSDGSFFLYSKLTVDKSRWQQGNVFSCSVMHEALHNHYTQKSLSLSPG

SEQ ID NO: 4723 - protein, 606 aa, synthetic construct
  REGION 1..606: note = R_VH-CH1/Q39K/S183E/CLD201/hole/SIDE/RF
QVQLQQPGAELVKPGASVKMSCKASGYTFTSYNMHWVKKTPGRGLEWIGAIYPGNGDTSYNQKFKGKATLTADKSSSTAYMQLSSLTSEDSAVYYCARSTYYGGDWYFNVWGAGTTVTVSAASTKGPSVFPLAPSSKSTSGGTAALGCLVKDYFPEPVTVSWNSGALTSGVHTFPAVLQSSGLYSLESVVTVPSSSLGTQTYICNVNHKPSNTKVDKKVEPKSCTDWSPYADQSIKVRISLKSALGDKAYEWNDNEMYLFRSSVAYAMRQYFLKVKNQMILFGEEDVRVANLKPRISFNFFVTAPKNVSDIIPRTEVEKAIRMSRSRINDAFRLNDNSLEFLGIQPTLGPPNQPPVSTSTSPTRSMAPGAVHLPQPVSTRDKTHTCPPCPAPELLGGPDVFLFPPKPKDTLMISRTPEVTCVVVDVSHEDPEVKFNWYVDGVEVHNAKTKPREEQYNSTYRVVSVLTVLHQDWLNGKEYKCKVSNKALPAPEEKTISKAKGQPREPQVCTLPPSRDELTKNQVSLSCAVKGFYPSDIAVEWESNGQPENNYKTTPPVLDSDGSFFLVSKLTVDKSRWQQGNVFSCSVMHEALHNRFTQKSLSLSPG

SEQ ID NO: 4724 - protein, 438 aa, synthetic construct
  REGION 1..438: note = FMC63_VK-x-CH1/Q38E/S183K/knob/SIDE
DIQMTQTTSSLSASLGDRVTISCRASQDISKYLNWYQEKPDGTVKLLIYHTSRLHSGVPSRFSGSGSGTDYSLTISNLEQEDIATYFCQQGNTLPYTFGGGTKVEIKSSASTKGPSVFPLAPSSKSTSGGTAALGCLVKDYFPEPVTVSWNSGALTSGVHTFPAVLQSSGLYSLKSVVTVPSSSLGTQTYICNVNHKPSNTKVDKKVEPKSCDKTHTCPPCPAPELLGGPDVFLFPPKPKDTLMISRTPEVTCVVVDVSHEDPEVKFNWYVDGVEVHNAKTKPREEQYNSTYRVVSVLTVLHQDWLNGKEYKCKVSNKALPAPEEKTISKAKGQPREPQVYTLPPCRDELTKNQVSLWCLVKGFYPSDIAVEWESNGQPENNYKTTPPVLDSDGSFFLYSKLTVDKSRWQQGNVFSCSVMHEALHNHYTQKSLSLSPG

SEQ ID NO: 4725 - protein, 438 aa, synthetic construct
  REGION 1..438: note = FMC63_VK-x-CH1/Q38K/S183K/knob/SIDE
DIQMTQTTSSLSASLGDRVTISCRASQDISKYLNWYQKKPDGTVKLLIYHTSRLHSGVPSRFSGSGSGTDYSLTISNLEQEDIATYFCQQGNTLPYTFGGGTKVEIKSSASTKGPSVFPLAPSSKSTSGGTAALGCLVKDYFPEPVTVSWNSGALTSGVHTFPAVLQSSGLYSLKSVVTVPSSSLGTQTYICNVNHKPSNTKVDKKVEPKSCDKTHTCPPCPAPELLGGPDVFLFPPKPKDTLMISRTPEVTCVVVDVSHEDPEVKFNWYVDGVEVHNAKTKPREEQYNSTYRVVSVLTVLHQDWLNGKEYKCKVSNKALPAPEEKTISKAKGQPREPQVYTLPPCRDELTKNQVSLWCLVKGFYPSDIAVEWESNGQPENNYKTTPPVLDSDGSFFLYSKLTVDKSRWQQGNVFSCSVMHEALHNHYTQKSLSLSPG

SEQ ID NO: 4726 - protein, 605 aa, synthetic construct
  REGION 1..605: note = FMC63_VH-CH1/N84S/K147E/K213E/CLD201/hole/SIDE/RF
EVKLQESGPGLVAPSQSLSVTCTVSGVSLPDYGVSWIRQPPRKGLEWLGVIWGSETTYYNSALKSRLTIIKDNSKSQVFLKMSSLQTDDTAIYYCAKHYYYGGSYAMDYWGQGTSVTVSSASTKGPSVFPLAPSSKSTSGGTAALGCLVEDYFPEPVTVSWNSGALTSGVHTFPAVLQSSGLYSLSSVVTVPSSSLGTQTYICNVNHKPSNTKVDEKVEPKSCTDWSPYADQSIKVRISLKSALGDKAYEWNDNEMYLFRSSVAYAMRQYFLKVKNQMILFGEEDVRVANLKPRISFNFFVTAPKNVSDIIPRTEVEKAIRMSRSRINDAFRLNDNSLEFLGIQPTLGPPNQPPVSTSTSPTRSMAPGAVHLPQPVSTRDKTHTCPPCPAPELLGGPDVFLFPPKPKDTLMISRTPEVTCVVVDVSHEDPEVKFNWYVDGVEVHNAKTKPREEQYNSTYRVVSVLTVLHQDWLNGKEYKCKVSNKALPAPEEKTISKAKGQPREPQVCTLPPSRDELTKNQVSLSCAVKGFYPSDIAVEWESNGQPENNYKTTPPVLDSDGSFFLVSKLTVDKSRWQQGNVFSCSVMHEALHNRFTQKSLSLSPG

SEQ ID NO: 4727 - protein, 437 aa, synthetic construct
  REGION 1..437: note = R_VK-x-CH1/knob/SIDE
QIVLSQSPAILSASPGEKVTMTCRASSSVSYIHWFQQKPGSSPKPWIYATSNLASGVPVRFSGSGSGTSYSLTISRVEAEDAATYYCQQWTSNPPTFGGGTKVEIKSSASTKGPSVFPLAPSSKSTSGGTAALGCLVKDYFPEPVTVSWNSGALTSGVHTFPAVLQSSGLYSLSSVVTVPSSSLGTQTYICNVNHKPSNTKVDKKVEPKSCDKTHTCPPCPAPELLGGPDVFLFPPKPKDTLMISRTPEVTCVVVDVSHEDPEVKFNWYVDGVEVHNAKTKPREEQYNSTYRVVSVLTVLHQDWLNGKEYKCKVSNKALPAPEEKTISKAKGQPREPQVYTLPPCRDELTKNQVSLWCLVKGFYPSDIAVEWESNGQPENNYKTTPPVLDSDGSFFLYSKLTVDKSRWQQGNVFSCSVMHEALHNHYTQKSLSLSPG

SEQ ID NO: 4728 - protein, 605 aa, synthetic construct
  REGION 1..605: note = FMC63_VH-CH1/N84S/Q39K/S183E/CLD201/hole/SIDE/RF
EVKLQESGPGLVAPSQSLSVTCTVSGVSLPDYGVSWIRKPPRKGLEWLGVIWGSETTYYNSALKSRLTIIKDNSKSQVFLKMSSLQTDDTAIYYCAKHYYYGGSYAMDYWGQGTSVTVSSASTKGPSVFPLAPSSKSTSGGTAALGCLVKDYFPEPVTVSWNSGALTSGVHTFPAVLQSSGLYSLESVVTVPSSSLGTQTYICNVNHKPSNTKVDKKVEPKSCTDWSPYADQSIKVRISLKSALGDKAYEWNDNEMYLFRSSVAYAMRQYFLKVKNQMILFGEEDVRVANLKPRISFNFFVTAPKNVSDIIPRTEVEKAIRMSRSRINDAFRLNDNSLEFLGIQPTLGPPNQPPVSTSTSPTRSMAPGAVHLPQPVSTRDKTHTCPPCPAPELLGGPDVFLFPPKPKDTLMISRTPEVTCVVVDVSHEDPEVKFNWYVDGVEVHNAKTKPREEQYNSTYRVVSVLTVLHQDWLNGKEYKCKVSNKALPAPEEKTISKAKGQPREPQVCTLPPSRDELTKNQVSLSCAVKGFYPSDIAVEWESNGQPENNYKTTPPVLDSDGSFFLVSKLTVDKSRWQQGNVFSCSVMHEALHNRFTQKSLSLSPG

SEQ ID NO: 4729 - protein, 437 aa, synthetic construct
  REGION 1..437: note = R_VK-x-CH1/Q38E/S183K/knob/SIDE
QIVLSQSPAILSASPGEKVTMTCRASSSVSYIHWFQEKPGSSPKPWIYATSNLASGVPVRFSGSGSGTSYSLTISRVEAEDAATYYCQQWTSNPPTFGGGTKVEIKSSASTKGPSVFPLAPSSKSTSGGTAALGCLVKDYFPEPVTVSWNSGALTSGVHTFPAVLQSSGLYSLKSVVTVPSSSLGTQTYICNVNHKPSNTKVDKKVEPKSCDKTHTCPPCPAPELLGGPDVFLFPPKPKDTLMISRTPEVTCVVVDVSHEDPEVKFNWYVDGVEVHNAKTKPREEQYNSTYRVVSVLTVLHQDWLNGKEYKCKVSNKALPAPEEKTISKAKGQPREPQVYTLPPCRDELTKNQVSLWCLVKGFYPSDIAVEWESNGQPENNYKTTPPVLDSDGSFFLYSKLTVDKSRWQQGNVFSCSVMHEALHNHYTQKSLSLSPG

SEQ ID NO: 4730 - protein, 437 aa, synthetic construct
  REGION 1..437: note = R_VK-x-CH1/Q38K/S183K/knob/SIDE
QIVLSQSPAILSASPGEKVTMTCRASSSVSYIHWFQKKPGSSPKPWIYATSNLASGVPVRFSGSGSGTSYSLTISRVEAEDAATYYCQQWTSNPPTFGGGTKVEIKSSASTKGPSVFPLAPSSKSTSGGTAALGCLVKDYFPEPVTVSWNSGALTSGVHTFPAVLQSSGLYSLKSVVTVPSSSLGTQTYICNVNHKPSNTKVDKKVEPKSCDKTHTCPPCPAPELLGGPDVFLFPPKPKDTLMISRTPEVTCVVVDVSHEDPEVKFNWYVDGVEVHNAKTKPREEQYNSTYRVVSVLTVLHQDWLNGKEYKCKVSNKALPAPEEKTISKAKGQPREPQVYTLPPCRDELTKNQVSLWCLVKGFYPSDIAVEWESNGQPENNYKTTPPVLDSDGSFFLYSKLTVDKSRWQQGNVFSCSVMHEALHNHYTQKSLSLSPG

SEQ ID NO: 4731 - protein, 450 aa, synthetic construct
  REGION 1..450: note = R_VH-CH
QVQLQQPGAELVKPGASVKMSCKASGYTFTSYNMHWVKQTPGRGLEWIGAIYPGNGDTSYNQKFKGKATLTADKSSSTAYMQLSSLTSEDSAVYYCARSTYYGGDWYFNVWGAGTTVTVSAASTKGPSVFPLAPSSKSTSGGTAALGCLVKDYFPEPVTVSWNSGALTSGVHTFPAVLQSSGLYSLSSVVTVPSSSLGTQTYICNVNHKPSNTKVDKKAEPKSCDKTHTCPPCPAPELLGGPSVFLFPPKPKDTLMISRTPEVTCVVVDVSHEDPEVKFNWYVDGVEVHNAKTKPREEQYNSTYRVVSVLTVLHQDWLNGKEYKCKVSNKALPAPIEKTISKAKGQPREPQVYTLPPSRDELTKNQVSLTCLVKGFYPSDIAVEWESNGQPENNYKTTPPVLDSDGSFFLYSKLTVDKSRWQQGNVFSCSVMHEALHNHYTQKSLSLSPG

SEQ ID NO: 4732 - protein, 450 aa, synthetic construct
  REGION 1..450: note = R_VH-CH/SIDE
QVQLQQPGAELVKPGASVKMSCKASGYTFTSYNMHWVKQTPGRGLEWIGAIYPGNGDTSYNQKFKGKATLTADKSSSTAYMQLSSLTSEDSAVYYCARSTYYGGDWYFNVWGAGTTVTVSAASTKGPSVFPLAPSSKSTSGGTAALGCLVKDYFPEPVTVSWNSGALTSGVHTFPAVLQSSGLYSLSSVVTVPSSSLGTQTYICNVNHKPSNTKVDKKAEPKSCDKTHTCPPCPAPELLGGPDVFLFPPKPKDTLMISRTPEVTCVVVDVSHEDPEVKFNWYVDGVEVHNAKTKPREEQYNSTYRVVSVLTVLHQDWLNGKEYKCKVSNKALPAPEEKTISKAKGQPREPQVYTLPPSRDELTKNQVSLTCLVKGFYPSDIAVEWESNGQPENNYKTTPPVLDSDGSFFLYSKLTVDKSRWQQGNVFSCSVMHEALHNHYTQKSLSLSPG

SEQ ID NO: 4733 - protein, 606 aa, synthetic construct
  REGION 1..606: note = R_VH-CH1/CLD201/hole/RF
QVQLQQPGAELVKPGASVKMSCKASGYTFTSYNMHWVKQTPGRGLEWIGAIYPGNGDTSYNQKFKGKATLTADKSSSTAYMQLSSLTSEDSAVYYCARSTYYGGDWYFNVWGAGTTVTVSAASTKGPSVFPLAPSSKSTSGGTAALGCLVKDYFPEPVTVSWNSGALTSGVHTFPAVLQSSGLYSLSSVVTVPSSSLGTQTYICNVNHKPSNTKVDKKVEPKSCTDWSPYADQSIKVRISLKSALGDKAYEWNDNEMYLFRSSVAYAMRQYFLKVKNQMILFGEEDVRVANLKPRISFNFFVTAPKNVSDIIPRTEVEKAIRMSRSRINDAFRLNDNSLEFLGIQPTLGPPNQPPVSTSTSPTRSMAPGAVHLPQPVSTRDKTHTCPPCPAPELLGGPSVFLFPPKPKDTLMISRTPEVTCVVVDVSHEDPEVKFNWYVDGVEVHNAKTKPREEQYNSTYRVVSVLTVLHQDWLNGKEYKCKVSNKALPAPIEKTISKAKGQPREPQVCTLPPSRDELTKNQVSLSCAVKGFYPSDIAVEWESNGQPENNYKTTPPVLDSDGSFFLVSKLTVDKSRWQQGNVFSCSVMHEALHNRFTQKSLSLSPG

SEQ ID NO: 4734 - protein, 450 aa, synthetic construct
  REGION 1..450: note = R_VH-CH1/knob
QVQLQQPGAELVKPGASVKMSCKASGYTFTSYNMHWVKQTPGRGLEWIGAIYPGNGDTSYNQKFKGKATLTADKSSSTAYMQLSSLTSEDSAVYYCARSTYYGGDWYFNVWGAGTTVTVSAASTKGPSVFPLAPSSKSTSGGTAALGCLVKDYFPEPVTVSWNSGALTSGVHTFPAVLQSSGLYSLSSVVTVPSSSLGTQTYICNVNHKPSNTKVDKKVEPKSCDKTHTCPPCPAPELLGGPSVFLFPPKPKDTLMISRTPEVTCVVVDVSHEDPEVKFNWYVDGVEVHNAKTKPREEQYNSTYRVVSVLTVLHQDWLNGKEYKCKVSNKALPAPIEKTISKAKGQPREPQVYTLPPCRDELTKNQVSLWCLVKGFYPSDIAVEWESNGQPENNYKTTPPVLDSDGSFFLYSKLTVDKSRWQQGNVFSCSVMHEALHNHYTQKSLSLSPG

SEQ ID NO: 4735 - protein, 606 aa, synthetic construct
  REGION 1..606: note = R_VH-CH1/CLD201/hole/SSDA/RF
QVQLQQPGAELVKPGASVKMSCKASGYTFTSYNMHWVKQTPGRGLEWIGAIYPGNGDTSYNQKFKGKATLTADKSSSTAYMQLSSLTSEDSAVYYCARSTYYGGDWYFNVWGAGTTVTVSAASTKGPSVFPLAPSSKSTSGGTAALGCLVKDYFPEPVTVSWNSGALTSGVHTFPAVLQSSGLYSLSSVVTVPSSSLGTQTYICNVNHKPSNTKVDKKVEPKSCTDWSPYADQSIKVRISLKSALGDKAYEWNDNEMYLFRSSVAYAMRQYFLKVKNQMILFGEEDVRVANLKPRISFNFFVTAPKNVSDIIPRTEVEKAIRMSRSRINDAFRLNDNSLEFLGIQPTLGPPNQPPVSTSTSPTRSMAPGAVHLPQPVSTRDKTHTCPPCPAPELLGGPDVFLFPPKPKDTLMISRTPEVTCVVVDVSHEDPEVKFNWYVDGVEVHNAKTKPREEQYNATYRVVSVLTVLHQDWLNGKEYKCKVSNKALPAPIEKTISKAKGQPREPQVCTLPPSRDELTKNQVSLSCAVKGFYPSDIAVEWESNGQPENNYKTTPPVLDSDGSFFLVSKLTVDKSRWQQGNVFSCSVMHEALHNRFTQKSLSLSPG

SEQ ID NO: 4736 - protein, 450 aa, synthetic construct
  REGION 1..450: note = R_VH-CH1/knob/AILE
QVQLQQPGAELVKPGASVKMSCKASGYTFTSYNMHWVKQTPGRGLEWIGAIYPGNGDTSYNQKFKGKATLTADKSSSTAYMQLSSLTSEDSAVYYCARSTYYGGDWYFNVWGAGTTVTVSAASTKGPSVFPLAPSSKSTSGGTAALGCLVKDYFPEPVTVSWNSGALTSGVHTFPAVLQSSGLYSLSSVVTVPSSSLGTQTYICNVNHKPSNTKVDKKVEPKSCDKTHTCPPCPAPELLGGPSVFLFPPKPKDTLMISRTPEVTCVVVDVSHEDPEVKFNWYVDGVEVHNAKTKPREEQYNSTYRVVSVLTVLHQDWLNGKEYKCKVSNKALPLPEEKTISKAKGQPREPQVYTLPPCRDELTKNQVSLWCLVKGFYPSDIAVEWESNGQPENNYKTTPPVLDSDGSFFLYSKLTVDKSRWQQGNVFSCSVMHEALHNHYTQKSLSLSPG

SEQ ID NO: 4737 - protein, 606 aa, synthetic construct
  REGION 1..606: note = R_VH-CH1/CLD201/hole/AILE/RF
QVQLQQPGAELVKPGASVKMSCKASGYTFTSYNMHWVKQTPGRGLEWIGAIYPGNGDTSYNQKFKGKATLTADKSSSTAYMQLSSLTSEDSAVYYCARSTYYGGDWYFNVWGAGTTVTVSAASTKGPSVFPLAPSSKSTSGGTAALGCLVKDYFPEPVTVSWNSGALTSGVHTFPAVLQSSGLYSLSSVVTVPSSSLGTQTYICNVNHKPSNTKVDKKVEPKSCTDWSPYADQSIKVRISLKSALGDKAYEWNDNEMYLFRSSVAYAMRQYFLKVKNQMILFGEEDVRVANLKPRISFNFFVTAPKNVSDIIPRTEVEKAIRMSRSRINDAFRLNDNSLEFLGIQPTLGPPNQPPVSTSTSPTRSMAPGAVHLPQPVSTRDKTHTCPPCPAPELLGGPSVFLFPPKPKDTLMISRTPEVTCVVVDVSHEDPEVKFNWYVDGVEVHNAKTKPREEQYNSTYRVVSVLTVLHQDWLNGKEYKCKVSNKALPLPEEKTISKAKGQPREPQVCTLPPSRDELTKNQVSLSCAVKGFYPSDIAVEWESNGQPENNYKTTPPVLDSDGSFFLVSKLTVDKSRWQQGNVFSCSVMHEALHNRFTQKSLSLSPG

SEQ ID NO: 4738 - protein, 450 aa, synthetic construct
  REGION 1..450: note = R_VH-CH1/knob/SSDA
QVQLQQPGAELVKPGASVKMSCKASGYTFTSYNMHWVKQTPGRGLEWIGAIYPGNGDTSYNQKFKGKATLTADKSSSTAYMQLSSLTSEDSAVYYCARSTYYGGDWYFNVWGAGTTVTVSAASTKGPSVFPLAPSSKSTSGGTAALGCLVKDYFPEPVTVSWNSGALTSGVHTFPAVLQSSGLYSLSSVVTVPSSSLGTQTYICNVNHKPSNTKVDKKVEPKSCDKTHTCPPCPAPELLGGPDVFLFPPKPKDTLMISRTPEVTCVVVDVSHEDPEVKFNWYVDGVEVHNAKTKPREEQYNATYRVVSVLTVLHQDWLNGKEYKCKVSNKALPAPIEKTISKAKGQPREPQVYTLPPCRDELTKNQVSLWCLVKGFYPSDIAVEWESNGQPENNYKTTPPVLDSDGSFFLYSKLTVDKSRWQQGNVFSCSVMHEALHNHYTQKSLSLSPG

SEQ ID NO: 4739 - protein, 606 aa, synthetic construct
  REGION 1..606: note = R_VH-CH1/CLD201/hole/SIDE/RF
QVQLQQPGAELVKPGASVKMSCKASGYTFTSYNMHWVKQTPGRGLEWIGAIYPGNGDTSYNQKFKGKATLTADKSSSTAYMQLSSLTSEDSAVYYCARSTYYGGDWYFNVWGAGTTVTVSAASTKGPSVFPLAPSSKSTSGGTAALGCLVKDYFPEPVTVSWNSGALTSGVHTFPAVLQSSGLYSLSSVVTVPSSSLGTQTYICNVNHKPSNTKVDKKVEPKSCTDWSPYADQSIKVRISLKSALGDKAYEWNDNEMYLFRSSVAYAMRQYFLKVKNQMILFGEEDVRVANLKPRISFNFFVTAPKNVSDIIPRTEVEKAIRMSRSRINDAFRLNDNSLEFLGIQPTLGPPNQPPVSTSTSPTRSMAPGAVHLPQPVSTRDKTHTCPPCPAPELLGGPDVFLFPPKPKDTLMISRTPEVTCVVVDVSHEDPEVKFNWYVDGVEVHNAKTKPREEQYNSTYRVVSVLTVLHQDWLNGKEYKCKVSNKALPAPEEKTISKAKGQPREPQVCTLPPSRDELTKNQVSLSCAVKGFYPSDIAVEWESNGQPENNYKTTPPVLDSDGSFFLVSKLTVDKSRWQQGNVFSCSVMHEALHNRFTQKSLSLSPG

SEQ ID NO: 4740 - protein, 450 aa, synthetic construct
  REGION 1..450: note = R_VH-CH1/knob/SIDE
QVQLQQPGAELVKPGASVKMSCKASGYTFTSYNMHWVKQTPGRGLEWIGAIYPGNGDTSYNQKFKGKATLTADKSSSTAYMQLSSLTSEDSAVYYCARSTYYGGDWYFNVWGAGTTVTVSAASTKGPSVFPLAPSSKSTSGGTAALGCLVKDYFPEPVTVSWNSGALTSGVHTFPAVLQSSGLYSLSSVVTVPSSSLGTQTYICNVNHKPSNTKVDKKVEPKSCDKTHTCPPCPAPELLGGPDVFLFPPKPKDTLMISRTPEVTCVVVDVSHEDPEVKFNWYVDGVEVHNAKTKPREEQYNSTYRVVSVLTVLHQDWLNGKEYKCKVSNKALPAPEEKTISKAKGQPREPQVYTLPPCRDELTKNQVSLWCLVKGFYPSDIAVEWESNGQPENNYKTTPPVLDSDGSFFLYSKLTVDKSRWQQGNVFSCSVMHEALHNHYTQKSLSLSPG

SEQ ID NO: 4741 - protein, 449 aa, synthetic construct
  REGION 1..449: note = FMC63_VH-CH/N84S
EVKLQESGPGLVAPSQSLSVTCTVSGVSLPDYGVSWIRQPPRKGLEWLGVIWGSETTYYNSALKSRLTIIKDNSKSQVFLKMSSLQTDDTAIYYCAKHYYYGGSYAMDYWGQGTSVTVSSASTKGPSVFPLAPSSKSTSGGTAALGCLVKDYFPEPVTVSWNSGALTSGVHTFPAVLQSSGLYSLSSVVTVPSSSLGTQTYICNVNHKPSNTKVDKKAEPKSCDKTHTCPPCPAPELLGGPSVFLFPPKPKDTLMISRTPEVTCVVVDVSHEDPEVKFNWYVDGVEVHNAKTKPREEQYNSTYRVVSVLTVLHQDWLNGKEYKCKVSNKALPAPIEKTISKAKGQPREPQVYTLPPSRDELTKNQVSLTCLVKGFYPSDIAVEWESNGQPENNYKTTPPVLDSDGSFFLYSKLTVDKSRWQQGNVFSCSVMHEALHNHYTQKSLSLSPG

SEQ ID NO: 4742 - protein, 449 aa, synthetic construct
  REGION 1..449: note = FMC63_VH-CH/N84S/SIDE
EVKLQESGPGLVAPSQSLSVTCTVSGVSLPDYGVSWIRQPPRKGLEWLGVIWGSETTYYNSALKSRLTIIKDNSKSQVFLKMSSLQTDDTAIYYCAKHYYYGGSYAMDYWGQGTSVTVSSASTKGPSVFPLAPSSKSTSGGTAALGCLVKDYFPEPVTVSWNSGALTSGVHTFPAVLQSSGLYSLSSVVTVPSSSLGTQTYICNVNHKPSNTKVDKKAEPKSCDKTHTCPPCPAPELLGGPDVFLFPPKPKDTLMISRTPEVTCVVVDVSHEDPEVKFNWYVDGVEVHNAKTKPREEQYNSTYRVVSVLTVLHQDWLNGKEYKCKVSNKALPAPEEKTISKAKGQPREPQVYTLPPSRDELTKNQVSLTCLVKGFYPSDIAVEWESNGQPENNYKTTPPVLDSDGSFFLYSKLTVDKSRWQQGNVFSCSVMHEALHNHYTQKSLSLSPG

SEQ ID NO: 4743 - protein, 605 aa, synthetic construct
  REGION 1..605: note = FMC63_VH-CH1/N84S/CLD201/hole/RF
EVKLQESGPGLVAPSQSLSVTCTVSGVSLPDYGVSWIRQPPRKGLEWLGVIWGSETTYYNSALKSRLTIIKDNSKSQVFLKMSSLQTDDTAIYYCAKHYYYGGSYAMDYWGQGTSVTVSSASTKGPSVFPLAPSSKSTSGGTAALGCLVKDYFPEPVTVSWNSGALTSGVHTFPAVLQSSGLYSLSSVVTVPSSSLGTQTYICNVNHKPSNTKVDKKVEPKSCTDWSPYADQSIKVRISLKSALGDKAYEWNDNEMYLFRSSVAYAMRQYFLKVKNQMILFGEEDVRVANLKPRISFNFFVTAPKNVSDIIPRTEVEKAIRMSRSRINDAFRLNDNSLEFLGIQPTLGPPNQPPVSTSTSPTRSMAPGAVHLPQPVSTRDKTHTCPPCPAPELLGGPSVFLFPPKPKDTLMISRTPEVTCVVVDVSHEDPEVKFNWYVDGVEVHNAKTKPREEQYNSTYRVVSVLTVLHQDWLNGKEYKCKVSNKALPAPIEKTISKAKGQPREPQVCTLPPSRDELTKNQVSLSCAVKGFYPSDIAVEWESNGQPENNYKTTPPVLDSDGSFFLVSKLTVDKSRWQQGNVFSCSVMHEALHNRFTQKSLSLSPG

SEQ ID NO: 4744 - protein, 449 aa, synthetic construct
  REGION 1..449: note = FMC63_VH-CH1/N84S/knob
EVKLQESGPGLVAPSQSLSVTCTVSGVSLPDYGVSWIRQPPRKGLEWLGVIWGSETTYYNSALKSRLTIIKDNSKSQVFLKMSSLQTDDTAIYYCAKHYYYGGSYAMDYWGQGTSVTVSSASTKGPSVFPLAPSSKSTSGGTAALGCLVKDYFPEPVTVSWNSGALTSGVHTFPAVLQSSGLYSLSSVVTVPSSSLGTQTYICNVNHKPSNTKVDKKVEPKSCDKTHTCPPCPAPELLGGPSVFLFPPKPKDTLMISRTPEVTCVVVDVSHEDPEVKFNWYVDGVEVHNAKTKPREEQYNSTYRVVSVLTVLHQDWLNGKEYKCKVSNKALPAPIEKTISKAKGQPREPQVYTLPPCRDELTKNQVSLWCLVKGFYPSDIAVEWESNGQPENNYKTTPPVLDSDGSFFLYSKLTVDKSRWQQGNVFSCSVMHEALHNHYTQKSLSLSPG

SEQ ID NO: 4745 - protein, 605 aa, synthetic construct
  REGION 1..605: note = FMC63_VH-CH1/N84S/CLD201/hole/SSDA/RF
EVKLQESGPGLVAPSQSLSVTCTVSGVSLPDYGVSWIRQPPRKGLEWLGVIWGSETTYYNSALKSRLTIIKDNSKSQVFLKMSSLQTDDTAIYYCAKHYYYGGSYAMDYWGQGTSVTVSSASTKGPSVFPLAPSSKSTSGGTAALGCLVKDYFPEPVTVSWNSGALTSGVHTFPAVLQSSGLYSLSSVVTVPSSSLGTQTYICNVNHKPSNTKVDKKVEPKSCTDWSPYADQSIKVRISLKSALGDKAYEWNDNEMYLFRSSVAYAMRQYFLKVKNQMILFGEEDVRVANLKPRISFNFFVTAPKNVSDIIPRTEVEKAIRMSRSRINDAFRLNDNSLEFLGIQPTLGPPNQPPVSTSTSPTRSMAPGAVHLPQPVSTRDKTHTCPPCPAPELLGGPDVFLFPPKPKDTLMISRTPEVTCVVVDVSHEDPEVKFNWYVDGVEVHNAKTKPREEQYNATYRVVSVLTVLHQDWLNGKEYKCKVSNKALPAPIEKTISKAKGQPREPQVCTLPPSRDELTKNQVSLSCAVKGFYPSDIAVEWESNGQPENNYKTTPPVLDSDGSFFLVSKLTVDKSRWQQGNVFSCSVMHEALHNRFTQKSLSLSPG

SEQ ID NO: 4746 - protein, 449 aa, synthetic construct
  REGION 1..449: note = FMC63_VH-CH1/N84S/knob/AILE
EVKLQESGPGLVAPSQSLSVTCTVSGVSLPDYGVSWIRQPPRKGLEWLGVIWGSETTYYNSALKSRLTIIKDNSKSQVFLKMSSLQTDDTAIYYCAKHYYYGGSYAMDYWGQGTSVTVSSASTKGPSVFPLAPSSKSTSGGTAALGCLVKDYFPEPVTVSWNSGALTSGVHTFPAVLQSSGLYSLSSVVTVPSSSLGTQTYICNVNHKPSNTKVDKKVEPKSCDKTHTCPPCPAPELLGGPSVFLFPPKPKDTLMISRTPEVTCVVVDVSHEDPEVKFNWYVDGVEVHNAKTKPREEQYNSTYRVVSVLTVLHQDWLNGKEYKCKVSNKALPLPEEKTISKAKGQPREPQVYTLPPCRDELTKNQVSLWCLVKGFYPSDIAVEWESNGQPENNYKTTPPVLDSDGSFFLYSKLTVDKSRWQQGNVFSCSVMHEALHNHYTQKSLSLSPG

SEQ ID NO: 4747 - protein, 605 aa, synthetic construct
  REGION 1..605: note = FMC63_VH-CH1/N84S/CLD201/hole/AILE/RF
EVKLQESGPGLVAPSQSLSVTCTVSGVSLPDYGVSWIRQPPRKGLEWLGVIWGSETTYYNSALKSRLTIIKDNSKSQVFLKMSSLQTDDTAIYYCAKHYYYGGSYAMDYWGQGTSVTVSSASTKGPSVFPLAPSSKSTSGGTAALGCLVKDYFPEPVTVSWNSGALTSGVHTFPAVLQSSGLYSLSSVVTVPSSSLGTQTYICNVNHKPSNTKVDKKVEPKSCTDWSPYADQSIKVRISLKSALGDKAYEWNDNEMYLFRSSVAYAMRQYFLKVKNQMILFGEEDVRVANLKPRISFNFFVTAPKNVSDIIPRTEVEKAIRMSRSRINDAFRLNDNSLEFLGIQPTLGPPNQPPVSTSTSPTRSMAPGAVHLPQPVSTRDKTHTCPPCPAPELLGGPSVFLFPPKPKDTLMISRTPEVTCVVVDVSHEDPEVKFNWYVDGVEVHNAKTKPREEQYNSTYRVVSVLTVLHQDWLNGKEYKCKVSNKALPLPEEKTISKAKGQPREPQVCTLPPSRDELTKNQVSLSCAVKGFYPSDIAVEWESNGQPENNYKTTPPVLDSDGSFFLVSKLTVDKSRWQQGNVFSCSVMHEALHNRFTQKSLSLSPG

SEQ ID NO: 4748 - protein, 449 aa, synthetic construct
  REGION 1..449: note = FMC63_VH-CH1/N84S/knob/SSDA
EVKLQESGPGLVAPSQSLSVTCTVSGVSLPDYGVSWIRQPPRKGLEWLGVIWGSETTYYNSALKSRLTIIKDNSKSQVFLKMSSLQTDDTAIYYCAKHYYYGGSYAMDYWGQGTSVTVSSASTKGPSVFPLAPSSKSTSGGTAALGCLVKDYFPEPVTVSWNSGALTSGVHTFPAVLQSSGLYSLSSVVTVPSSSLGTQTYICNVNHKPSNTKVDKKVEPKSCDKTHTCPPCPAPELLGGPDVFLFPPKPKDTLMISRTPEVTCVVVDVSHEDPEVKFNWYVDGVEVHNAKTKPREEQYNATYRVVSVLTVLHQDWLNGKEYKCKVSNKALPAPIEKTISKAKGQPREPQVYTLPPCRDELTKNQVSLWCLVKGFYPSDIAVEWESNGQPENNYKTTPPVLDSDGSFFLYSKLTVDKSRWQQGNVFSCSVMHEALHNHYTQKSLSLSPG

SEQ ID NO: 4749 - protein, 605 aa, synthetic construct
  REGION 1..605: note = FMC63_VH-CH1/N84S/CLD201/hole/SIDE/RF
EVKLQESGPGLVAPSQSLSVTCTVSGVSLPDYGVSWIRQPPRKGLEWLGVIWGSETTYYNSALKSRLTIIKDNSKSQVFLKMSSLQTDDTAIYYCAKHYYYGGSYAMDYWGQGTSVTVSSASTKGPSVFPLAPSSKSTSGGTAALGCLVKDYFPEPVTVSWNSGALTSGVHTFPAVLQSSGLYSLSSVVTVPSSSLGTQTYICNVNHKPSNTKVDKKVEPKSCTDWSPYADQSIKVRISLKSALGDKAYEWNDNEMYLFRSSVAYAMRQYFLKVKNQMILFGEEDVRVANLKPRISFNFFVTAPKNVSDIIPRTEVEKAIRMSRSRINDAFRLNDNSLEFLGIQPTLGPPNQPPVSTSTSPTRSMAPGAVHLPQPVSTRDKTHTCPPCPAPELLGGPDVFLFPPKPKDTLMISRTPEVTCVVVDVSHEDPEVKFNWYVDGVEVHNAKTKPREEQYNSTYRVVSVLTVLHQDWLNGKEYKCKVSNKALPAPEEKTISKAKGQPREPQVCTLPPSRDELTKNQVSLSCAVKGFYPSDIAVEWESNGQPENNYKTTPPVLDSDGSFFLVSKLTVDKSRWQQGNVFSCSVMHEALHNRFTQKSLSLSPG

SEQ ID NO: 4750 - protein, 449 aa, synthetic construct
  REGION 1..449: note = FMC63_VH-CH1/N84S/knob/SIDE
EVKLQESGPGLVAPSQSLSVTCTVSGVSLPDYGVSWIRQPPRKGLEWLGVIWGSETTYYNSALKSRLTIIKDNSKSQVFLKMSSLQTDDTAIYYCAKHYYYGGSYAMDYWGQGTSVTVSSASTKGPSVFPLAPSSKSTSGGTAALGCLVKDYFPEPVTVSWNSGALTSGVHTFPAVLQSSGLYSLSSVVTVPSSSLGTQTYICNVNHKPSNTKVDKKVEPKSCDKTHTCPPCPAPELLGGPDVFLFPPKPKDTLMISRTPEVTCVVVDVSHEDPEVKFNWYVDGVEVHNAKTKPREEQYNSTYRVVSVLTVLHQDWLNGKEYKCKVSNKALPAPEEKTISKAKGQPREPQVYTLPPCRDELTKNQVSLWCLVKGFYPSDIAVEWESNGQPENNYKTTPPVLDSDGSFFLYSKLTVDKSRWQQGNVFSCSVMHEALHNHYTQKSLSLSPG

SEQ ID NO: 4751 - protein, 438 aa, synthetic construct
  REGION 1..438: note = FMC60_VK-x-CH1/Q38E/S183K/knob
DIQMTQSPSSLSASVGDRVTITCRASQDISKFLNWYQEKPGKAIKLLIYHTSRLHSGVPSRFSGSGSGTDFTLTISSLQPEDFATYYCQQGATLPYTFGPGTKVEIKSSASTKGPSVFPLAPSSKSTSGGTAALGCLVKDYFPEPVTVSWNSGALTSGVHTFPAVLQSSGLYSLKSVVTVPSSSLGTQTYICNVNHKPSNTKVDKKVEPKSCDKTHTCPPCPAPELLGGPSVFLFPPKPKDTLMISRTPEVTCVVVDVSHEDPEVKFNWYVDGVEVHNAKTKPREEQYNSTYRVVSVLTVLHQDWLNGKEYKCKVSNKALPAPIEKTISKAKGQPREPQVYTLPPCRDELTKNQVSLWCLVKGFYPSDIAVEWESNGQPENNYKTTPPVLDSDGSFFLYSKLTVDKSRWQQGNVFSCSVMHEALHNHYTQKSLSLSPG

SEQ ID NO: 4752 - protein, 438 aa, synthetic construct
  REGION 1..438: note = FMC60_VK-x-CH1/Q38K/S183K/knob
DIQMTQSPSSLSASVGDRVTITCRASQDISKFLNWYQKKPGKAIKLLIYHTSRLHSGVPSRFSGSGSGTDFTLTISSLQPEDFATYYCQQGATLPYTFGPGTKVEIKSSASTKGPSVFPLAPSSKSTSGGTAALGCLVKDYFPEPVTVSWNSGALTSGVHTFPAVLQSSGLYSLKSVVTVPSSSLGTQTYICNVNHKPSNTKVDKKVEPKSCDKTHTCPPCPAPELLGGPSVFLFPPKPKDTLMISRTPEVTCVVVDVSHEDPEVKFNWYVDGVEVHNAKTKPREEQYNSTYRVVSVLTVLHQDWLNGKEYKCKVSNKALPAPIEKTISKAKGQPREPQVYTLPPCRDELTKNQVSLWCLVKGFYPSDIAVEWESNGQPENNYKTTPPVLDSDGSFFLYSKLTVDKSRWQQGNVFSCSVMHEALHNHYTQKSLSLSPG

SEQ ID NO: 4753 - protein, 606 aa, synthetic construct
  REGION 1..606: note = R_VH-CH1/Q39E/S183E/CLD201/hole/RF
QVQLQQPGAELVKPGASVKMSCKASGYTFTSYNMHWVKETPGRGLEWIGAIYPGNGDTSYNQKFKGKATLTADKSSSTAYMQLSSLTSEDSAVYYCARSTYYGGDWYFNVWGAGTTVTVSAASTKGPSVFPLAPSSKSTSGGTAALGCLVKDYFPEPVTVSWNSGALTSGVHTFPAVLQSSGLYSLESVVTVPSSSLGTQTYICNVNHKPSNTKVDKKVEPKSCTDWSPYADQSIKVRISLKSALGDKAYEWNDNEMYLFRSSVAYAMRQYFLKVKNQMILFGEEDVRVANLKPRISFNFFVTAPKNVSDIIPRTEVEKAIRMSRSRINDAFRLNDNSLEFLGIQPTLGPPNQPPVSTSTSPTRSMAPGAVHLPQPVSTRDKTHTCPPCPAPELLGGPSVFLFPPKPKDTLMISRTPEVTCVVVDVSHEDPEVKFNWYVDGVEVHNAKTKPREEQYNSTYRVVSVLTVLHQDWLNGKEYKCKVSNKALPAPIEKTISKAKGQPREPQVCTLPPSRDELTKNQVSLSCAVKGFYPSDIAVEWESNGQPENNYKTTPPVLDSDGSFFLVSKLTVDKSRWQQGNVFSCSVMHEALHNRFTQKSLSLSPG

SEQ ID NO: 4754 - protein, 605 aa, synthetic construct
  REGION 1..605: note = FMC47_VH-CH1/N84S/Q39K/S183E/CLD201/hole/RF
QVQLVQSGGGVVQPGRSLRLSCAASGVSLPDYGVSWVRKAPGKGLEWVAVIWGSETTYYNSALKSRFTISRDNSKNTLYLQMSSLRAEDTAVYYCAKHYYYGGSFAMDYWGQGTLVTVSSASTKGPSVFPLAPSSKSTSGGTAALGCLVKDYFPEPVTVSWNSGALTSGVHTFPAVLQSSGLYSLESVVTVPSSSLGTQTYICNVNHKPSNTKVDKKVEPKSCTDWSPYADQSIKVRISLKSALGDKAYEWNDNEMYLFRSSVAYAMRQYFLKVKNQMILFGEEDVRVANLKPRISFNFFVTAPKNVSDIIPRTEVEKAIRMSRSRINDAFRLNDNSLEFLGIQPTLGPPNQPPVSTSTSPTRSMAPGAVHLPQPVSTRDKTHTCPPCPAPELLGGPSVFLFPPKPKDTLMISRTPEVTCVVVDVSHEDPEVKFNWYVDGVEVHNAKTKPREEQYNSTYRVVSVLTVLHQDWLNGKEYKCKVSNKALPAPIEKTISKAKGQPREPQVCTLPPSRDELTKNQVSLSCAVKGFYPSDIAVEWESNGQPENNYKTTPPVLDSDGSFFLVSKLTVDKSRWQQGNVFSCSVMHEALHNRFTQKSLSLSPG

SEQ ID NO: 4755 - protein, 605 aa, synthetic construct
  REGION 1..605: note = FMC47_VH-CH1/N84S/Q39E/S183E/CLD201/hole/RF
QVQLVQSGGGVVQPGRSLRLSCAASGVSLPDYGVSWVREAPGKGLEWVAVIWGSETTYYNSALKSRFTISRDNSKNTLYLQMSSLRAEDTAVYYCAKHYYYGGSFAMDYWGQGTLVTVSSASTKGPSVFPLAPSSKSTSGGTAALGCLVKDYFPEPVTVSWNSGALTSGVHTFPAVLQSSGLYSLESVVTVPSSSLGTQTYICNVNHKPSNTKVDKKVEPKSCTDWSPYADQSIKVRISLKSALGDKAYEWNDNEMYLFRSSVAYAMRQYFLKVKNQMILFGEEDVRVANLKPRISFNFFVTAPKNVSDIIPRTEVEKAIRMSRSRINDAFRLNDNSLEFLGIQPTLGPPNQPPVSTSTSPTRSMAPGAVHLPQPVSTRDKTHTCPPCPAPELLGGPSVFLFPPKPKDTLMISRTPEVTCVVVDVSHEDPEVKFNWYVDGVEVHNAKTKPREEQYNSTYRVVSVLTVLHQDWLNGKEYKCKVSNKALPAPIEKTISKAKGQPREPQVCTLPPSRDELTKNQVSLSCAVKGFYPSDIAVEWESNGQPENNYKTTPPVLDSDGSFFLVSKLTVDKSRWQQGNVFSCSVMHEALHNRFTQKSLSLSPG

SEQ ID NO: 4756 - protein, 606 aa, synthetic construct
  REGION 1..606: note = R_VH-CH1/Q39K/S183E/CLD201/hole/SD/RF
QVQLQQPGAELVKPGASVKMSCKASGYTFTSYNMHWVKKTPGRGLEWIGAIYPGNGDTSYNQKFKGKATLTADKSSSTAYMQLSSLTSEDSAVYYCARSTYYGGDWYFNVWGAGTTVTVSAASTKGPSVFPLAPSSKSTSGGTAALGCLVKDYFPEPVTVSWNSGALTSGVHTFPAVLQSSGLYSLESVVTVPSSSLGTQTYICNVNHKPSNTKVDKKVEPKSCTDWSPYADQSIKVRISLKSALGDKAYEWNDNEMYLFRSSVAYAMRQYFLKVKNQMILFGEEDVRVANLKPRISFNFFVTAPKNVSDIIPRTEVEKAIRMSRSRINDAFRLNDNSLEFLGIQPTLGPPNQPPVSTSTSPTRSMAPGAVHLPQPVSTRDKTHTCPPCPAPELLGGPDVFLFPPKPKDTLMISRTPEVTCVVVDVSHEDPEVKFNWYVDGVEVHNAKTKPREEQYNSTYRVVSVLTVLHQDWLNGKEYKCKVSNKALPAPIEKTISKAKGQPREPQVCTLPPSRDELTKNQVSLSCAVKGFYPSDIAVEWESNGQPENNYKTTPPVLDSDGSFFLVSKLTVDKSRWQQGNVFSCSVMHEALHNRFTQKSLSLSPG

SEQ ID NO: 4757 - protein, 438 aa, synthetic construct
  REGION 1..438: note = FMC60_VK-x-CH1/Q38E/S183K/knob/IE
DIQMTQSPSSLSASVGDRVTITCRASQDISKFLNWYQEKPGKAIKLLIYHTSRLHSGVPSRFSGSGSGTDFTLTISSLQPEDFATYYCQQGATLPYTFGPGTKVEIKSSASTKGPSVFPLAPSSKSTSGGTAALGCLVKDYFPEPVTVSWNSGALTSGVHTFPAVLQSSGLYSLKSVVTVPSSSLGTQTYICNVNHKPSNTKVDKKVEPKSCDKTHTCPPCPAPELLGGPSVFLFPPKPKDTLMISRTPEVTCVVVDVSHEDPEVKFNWYVDGVEVHNAKTKPREEQYNSTYRVVSVLTVLHQDWLNGKEYKCKVSNKALPAPEEKTISKAKGQPREPQVYTLPPCRDELTKNQVSLWCLVKGFYPSDIAVEWESNGQPENNYKTTPPVLDSDGSFFLYSKLTVDKSRWQQGNVFSCSVMHEALHNHYTQKSLSLSPG

SEQ ID NO: 4758 - protein, 438 aa, synthetic construct
  REGION 1..438: note = FMC60_VK-x-CH1/Q38K/S183K/knob/IE
DIQMTQSPSSLSASVGDRVTITCRASQDISKFLNWYQKKPGKAIKLLIYHTSRLHSGVPSRFSGSGSGTDFTLTISSLQPEDFATYYCQQGATLPYTFGPGTKVEIKSSASTKGPSVFPLAPSSKSTSGGTAALGCLVKDYFPEPVTVSWNSGALTSGVHTFPAVLQSSGLYSLKSVVTVPSSSLGTQTYICNVNHKPSNTKVDKKVEPKSCDKTHTCPPCPAPELLGGPSVFLFPPKPKDTLMISRTPEVTCVVVDVSHEDPEVKFNWYVDGVEVHNAKTKPREEQYNSTYRVVSVLTVLHQDWLNGKEYKCKVSNKALPAPEEKTISKAKGQPREPQVYTLPPCRDELTKNQVSLWCLVKGFYPSDIAVEWESNGQPENNYKTTPPVLDSDGSFFLYSKLTVDKSRWQQGNVFSCSVMHEALHNHYTQKSLSLSPG

SEQ ID NO: 4759 - protein, 606 aa, synthetic construct
  REGION 1..606: note = R_VH-CH1/Q39E/S183E/CLD201/hole/SD/RF
QVQLQQPGAELVKPGASVKMSCKASGYTFTSYNMHWVKETPGRGLEWIGAIYPGNGDTSYNQKFKGKATLTADKSSSTAYMQLSSLTSEDSAVYYCARSTYYGGDWYFNVWGAGTTVTVSAASTKGPSVFPLAPSSKSTSGGTAALGCLVKDYFPEPVTVSWNSGALTSGVHTFPAVLQSSGLYSLESVVTVPSSSLGTQTYICNVNHKPSNTKVDKKVEPKSCTDWSPYADQSIKVRISLKSALGDKAYEWNDNEMYLFRSSVAYAMRQYFLKVKNQMILFGEEDVRVANLKPRISFNFFVTAPKNVSDIIPRTEVEKAIRMSRSRINDAFRLNDNSLEFLGIQPTLGPPNQPPVSTSTSPTRSMAPGAVHLPQPVSTRDKTHTCPPCPAPELLGGPDVFLFPPKPKDTLMISRTPEVTCVVVDVSHEDPEVKFNWYVDGVEVHNAKTKPREEQYNSTYRVVSVLTVLHQDWLNGKEYKCKVSNKALPAPIEKTISKAKGQPREPQVCTLPPSRDELTKNQVSLSCAVKGFYPSDIAVEWESNGQPENNYKTTPPVLDSDGSFFLVSKLTVDKSRWQQGNVFSCSVMHEALHNRFTQKSLSLSPG

SEQ ID NO: 4760 - protein, 605 aa, synthetic construct
  REGION 1..605: note = FMC47_VH-CH1/N84S/Q39K/S183E/CLD201/hole/SD/RF
QVQLVQSGGGVVQPGRSLRLSCAASGVSLPDYGVSWVRKAPGKGLEWVAVIWGSETTYYNSALKSRFTISRDNSKNTLYLQMSSLRAEDTAVYYCAKHYYYGGSFAMDYWGQGTLVTVSSASTKGPSVFPLAPSSKSTSGGTAALGCLVKDYFPEPVTVSWNSGALTSGVHTFPAVLQSSGLYSLESVVTVPSSSLGTQTYICNVNHKPSNTKVDKKVEPKSCTDWSPYADQSIKVRISLKSALGDKAYEWNDNEMYLFRSSVAYAMRQYFLKVKNQMILFGEEDVRVANLKPRISFNFFVTAPKNVSDIIPRTEVEKAIRMSRSRINDAFRLNDNSLEFLGIQPTLGPPNQPPVSTSTSPTRSMAPGAVHLPQPVSTRDKTHTCPPCPAPELLGGPDVFLFPPKPKDTLMISRTPEVTCVVVDVSHEDPEVKFNWYVDGVEVHNAKTKPREEQYNSTYRVVSVLTVLHQDWLNGKEYKCKVSNKALPAPIEKTISKAKGQPREPQVCTLPPSRDELTKNQVSLSCAVKGFYPSDIAVEWESNGQPENNYKTTPPVLDSDGSFFLVSKLTVDKSRWQQGNVFSCSVMHEALHNRFTQKSLSLSPG

SEQ ID NO: 4761 - protein, 437 aa, synthetic construct
  REGION 1..437: note = R_VK-x-CH1/Q38E/S183K/knob/IE
QIVLSQSPAILSASPGEKVTMTCRASSSVSYIHWFQEKPGSSPKPWIYATSNLASGVPVRFSGSGSGTSYSLTISRVEAEDAATYYCQQWTSNPPTFGGGTKVEIKSSASTKGPSVFPLAPSSKSTSGGTAALGCLVKDYFPEPVTVSWNSGALTSGVHTFPAVLQSSGLYSLKSVVTVPSSSLGTQTYICNVNHKPSNTKVDKKVEPKSCDKTHTCPPCPAPELLGGPSVFLFPPKPKDTLMISRTPEVTCVVVDVSHEDPEVKFNWYVDGVEVHNAKTKPREEQYNSTYRVVSVLTVLHQDWLNGKEYKCKVSNKALPAPEEKTISKAKGQPREPQVYTLPPCRDELTKNQVSLWCLVKGFYPSDIAVEWESNGQPENNYKTTPPVLDSDGSFFLYSKLTVDKSRWQQGNVFSCSVMHEALHNHYTQKSLSLSPG

SEQ ID NO: 4762 - protein, 437 aa, synthetic construct
  REGION 1..437: note = R_VK-x-CH1/Q38K/S183K/knob/IE
QIVLSQSPAILSASPGEKVTMTCRASSSVSYIHWFQKKPGSSPKPWIYATSNLASGVPVRFSGSGSGTSYSLTISRVEAEDAATYYCQQWTSNPPTFGGGTKVEIKSSASTKGPSVFPLAPSSKSTSGGTAALGCLVKDYFPEPVTVSWNSGALTSGVHTFPAVLQSSGLYSLKSVVTVPSSSLGTQTYICNVNHKPSNTKVDKKVEPKSCDKTHTCPPCPAPELLGGPSVFLFPPKPKDTLMISRTPEVTCVVVDVSHEDPEVKFNWYVDGVEVHNAKTKPREEQYNSTYRVVSVLTVLHQDWLNGKEYKCKVSNKALPAPEEKTISKAKGQPREPQVYTLPPCRDELTKNQVSLWCLVKGFYPSDIAVEWESNGQPENNYKTTPPVLDSDGSFFLYSKLTVDKSRWQQGNVFSCSVMHEALHNHYTQKSLSLSPG

SEQ ID NO: 4763 - protein, 605 aa, synthetic construct
  REGION 1..605: note = FMC47_VH-CH1/N84S/Q39E/S183E/CLD201/hole/SD/RF
QVQLVQSGGGVVQPGRSLRLSCAASGVSLPDYGVSWVREAPGKGLEWVAVIWGSETTYYNSALKSRFTISRDNSKNTLYLQMSSLRAEDTAVYYCAKHYYYGGSFAMDYWGQGTLVTVSSASTKGPSVFPLAPSSKSTSGGTAALGCLVKDYFPEPVTVSWNSGALTSGVHTFPAVLQSSGLYSLESVVTVPSSSLGTQTYICNVNHKPSNTKVDKKVEPKSCTDWSPYADQSIKVRISLKSALGDKAYEWNDNEMYLFRSSVAYAMRQYFLKVKNQMILFGEEDVRVANLKPRISFNFFVTAPKNVSDIIPRTEVEKAIRMSRSRINDAFRLNDNSLEFLGIQPTLGPPNQPPVSTSTSPTRSMAPGAVHLPQPVSTRDKTHTCPPCPAPELLGGPDVFLFPPKPKDTLMISRTPEVTCVVVDVSHEDPEVKFNWYVDGVEVHNAKTKPREEQYNSTYRVVSVLTVLHQDWLNGKEYKCKVSNKALPAPIEKTISKAKGQPREPQVCTLPPSRDELTKNQVSLSCAVKGFYPSDIAVEWESNGQPENNYKTTPPVLDSDGSFFLVSKLTVDKSRWQQGNVFSCSVMHEALHNRFTQKSLSLSPG

SEQ ID NO: 4764 - protein, 606 aa, synthetic construct
  REGION 1..606: note = R_VH-CH1/Q39K/S183E/CLD201/hole/IE/RF
QVQLQQPGAELVKPGASVKMSCKASGYTFTSYNMHWVKKTPGRGLEWIGAIYPGNGDTSYNQKFKGKATLTADKSSSTAYMQLSSLTSEDSAVYYCARSTYYGGDWYFNVWGAGTTVTVSAASTKGPSVFPLAPSSKSTSGGTAALGCLVKDYFPEPVTVSWNSGALTSGVHTFPAVLQSSGLYSLESVVTVPSSSLGTQTYICNVNHKPSNTKVDKKVEPKSCTDWSPYADQSIKVRISLKSALGDKAYEWNDNEMYLFRSSVAYAMRQYFLKVKNQMILFGEEDVRVANLKPRISFNFFVTAPKNVSDIIPRTEVEKAIRMSRSRINDAFRLNDNSLEFLGIQPTLGPPNQPPVSTSTSPTRSMAPGAVHLPQPVSTRDKTHTCPPCPAPELLGGPSVFLFPPKPKDTLMISRTPEVTCVVVDVSHEDPEVKFNWYVDGVEVHNAKTKPREEQYNSTYRVVSVLTVLHQDWLNGKEYKCKVSNKALPAPEEKTISKAKGQPREPQVCTLPPSRDELTKNQVSLSCAVKGFYPSDIAVEWESNGQPENNYKTTPPVLDSDGSFFLVSKLTVDKSRWQQGNVFSCSVMHEALHNRFTQKSLSLSPG

SEQ ID NO: 4765 - protein, 438 aa, synthetic construct
  REGION 1..438: note = FMC60_VK-x-CH1/Q38E/S183K/knob/SD
DIQMTQSPSSLSASVGDRVTITCRASQDISKFLNWYQEKPGKAIKLLIYHTSRLHSGVPSRFSGSGSGTDFTLTISSLQPEDFATYYCQQGATLPYTFGPGTKVEIKSSASTKGPSVFPLAPSSKSTSGGTAALGCLVKDYFPEPVTVSWNSGALTSGVHTFPAVLQSSGLYSLKSVVTVPSSSLGTQTYICNVNHKPSNTKVDKKVEPKSCDKTHTCPPCPAPELLGGPDVFLFPPKPKDTLMISRTPEVTCVVVDVSHEDPEVKFNWYVDGVEVHNAKTKPREEQYNSTYRVVSVLTVLHQDWLNGKEYKCKVSNKALPAPIEKTISKAKGQPREPQVYTLPPCRDELTKNQVSLWCLVKGFYPSDIAVEWESNGQPENNYKTTPPVLDSDGSFFLYSKLTVDKSRWQQGNVFSCSVMHEALHNHYTQKSLSLSPG

SEQ ID NO: 4766 - protein, 438 aa, synthetic construct
  REGION 1..438: note = FMC60_VK-x-CH1/Q38K/S183K/knob/SD
DIQMTQSPSSLSASVGDRVTITCRASQDISKFLNWYQKKPGKAIKLLIYHTSRLHSGVPSRFSGSGSGTDFTLTISSLQPEDFATYYCQQGATLPYTFGPGTKVEIKSSASTKGPSVFPLAPSSKSTSGGTAALGCLVKDYFPEPVTVSWNSGALTSGVHTFPAVLQSSGLYSLKSVVTVPSSSLGTQTYICNVNHKPSNTKVDKKVEPKSCDKTHTCPPCPAPELLGGPDVFLFPPKPKDTLMISRTPEVTCVVVDVSHEDPEVKFNWYVDGVEVHNAKTKPREEQYNSTYRVVSVLTVLHQDWLNGKEYKCKVSNKALPAPIEKTISKAKGQPREPQVYTLPPCRDELTKNQVSLWCLVKGFYPSDIAVEWESNGQPENNYKTTPPVLDSDGSFFLYSKLTVDKSRWQQGNVFSCSVMHEALHNHYTQKSLSLSPG

SEQ ID NO: 4767 - protein, 606 aa, synthetic construct
  REGION 1..606: note = R_VH-CH1/Q39E/S183E/CLD201/hole/IE/RF
QVQLQQPGAELVKPGASVKMSCKASGYTFTSYNMHWVKETPGRGLEWIGAIYPGNGDTSYNQKFKGKATLTADKSSSTAYMQLSSLTSEDSAVYYCARSTYYGGDWYFNVWGAGTTVTVSAASTKGPSVFPLAPSSKSTSGGTAALGCLVKDYFPEPVTVSWNSGALTSGVHTFPAVLQSSGLYSLESVVTVPSSSLGTQTYICNVNHKPSNTKVDKKVEPKSCTDWSPYADQSIKVRISLKSALGDKAYEWNDNEMYLFRSSVAYAMRQYFLKVKNQMILFGEEDVRVANLKPRISFNFFVTAPKNVSDIIPRTEVEKAIRMSRSRINDAFRLNDNSLEFLGIQPTLGPPNQPPVSTSTSPTRSMAPGAVHLPQPVSTRDKTHTCPPCPAPELLGGPSVFLFPPKPKDTLMISRTPEVTCVVVDVSHEDPEVKFNWYVDGVEVHNAKTKPREEQYNSTYRVVSVLTVLHQDWLNGKEYKCKVSNKALPAPEEKTISKAKGQPREPQVCTLPPSRDELTKNQVSLSCAVKGFYPSDIAVEWESNGQPENNYKTTPPVLDSDGSFFLVSKLTVDKSRWQQGNVFSCSVMHEALHNRFTQKSLSLSPG

SEQ ID NO: 4768 - protein, 605 aa, synthetic construct
  REGION 1..605: note = FMC47_VH-CH1/N84S/Q39K/S183E/CLD201/hole/IE/RF
QVQLVQSGGGVVQPGRSLRLSCAASGVSLPDYGVSWVRKAPGKGLEWVAVIWGSETTYYNSALKSRFTISRDNSKNTLYLQMSSLRAEDTAVYYCAKHYYYGGSFAMDYWGQGTLVTVSSASTKGPSVFPLAPSSKSTSGGTAALGCLVKDYFPEPVTVSWNSGALTSGVHTFPAVLQSSGLYSLESVVTVPSSSLGTQTYICNVNHKPSNTKVDKKVEPKSCTDWSPYADQSIKVRISLKSALGDKAYEWNDNEMYLFRSSVAYAMRQYFLKVKNQMILFGEEDVRVANLKPRISFNFFVTAPKNVSDIIPRTEVEKAIRMSRSRINDAFRLNDNSLEFLGIQPTLGPPNQPPVSTSTSPTRSMAPGAVHLPQPVSTRDKTHTCPPCPAPELLGGPSVFLFPPKPKDTLMISRTPEVTCVVVDVSHEDPEVKFNWYVDGVEVHNAKTKPREEQYNSTYRVVSVLTVLHQDWLNGKEYKCKVSNKALPAPEEKTISKAKGQPREPQVCTLPPSRDELTKNQVSLSCAVKGFYPSDIAVEWESNGQPENNYKTTPPVLDSDGSFFLVSKLTVDKSRWQQGNVFSCSVMHEALHNRFTQKSLSLSPG

SEQ ID NO: 4769 - protein, 437 aa, synthetic construct
  REGION 1..437: note = R_VK-x-CH1/Q38E/S183K/knob/SD
QIVLSQSPAILSASPGEKVTMTCRASSSVSYIHWFQEKPGSSPKPWIYATSNLASGVPVRFSGSGSGTSYSLTISRVEAEDAATYYCQQWTSNPPTFGGGTKVEIKSSASTKGPSVFPLAPSSKSTSGGTAALGCLVKDYFPEPVTVSWNSGALTSGVHTFPAVLQSSGLYSLKSVVTVPSSSLGTQTYICNVNHKPSNTKVDKKVEPKSCDKTHTCPPCPAPELLGGPDVFLFPPKPKDTLMISRTPEVTCVVVDVSHEDPEVKFNWYVDGVEVHNAKTKPREEQYNSTYRVVSVLTVLHQDWLNGKEYKCKVSNKALPAPIEKTISKAKGQPREPQVYTLPPCRDELTKNQVSLWCLVKGFYPSDIAVEWESNGQPENNYKTTPPVLDSDGSFFLYSKLTVDKSRWQQGNVFSCSVMHEALHNHYTQKSLSLSPG

SEQ ID NO: 4770 - protein, 437 aa, synthetic construct
  REGION 1..437: note = R_VK-x-CH1/Q38K/S183K/knob/SD
QIVLSQSPAILSASPGEKVTMTCRASSSVSYIHWFQKKPGSSPKPWIYATSNLASGVPVRFSGSGSGTSYSLTISRVEAEDAATYYCQQWTSNPPTFGGGTKVEIKSSASTKGPSVFPLAPSSKSTSGGTAALGCLVKDYFPEPVTVSWNSGALTSGVHTFPAVLQSSGLYSLKSVVTVPSSSLGTQTYICNVNHKPSNTKVDKKVEPKSCDKTHTCPPCPAPELLGGPDVFLFPPKPKDTLMISRTPEVTCVVVDVSHEDPEVKFNWYVDGVEVHNAKTKPREEQYNSTYRVVSVLTVLHQDWLNGKEYKCKVSNKALPAPIEKTISKAKGQPREPQVYTLPPCRDELTKNQVSLWCLVKGFYPSDIAVEWESNGQPENNYKTTPPVLDSDGSFFLYSKLTVDKSRWQQGNVFSCSVMHEALHNHYTQKSLSLSPG

SEQ ID NO: 4771 - protein, 605 aa, synthetic construct
  REGION 1..605: note = FMC47_VH-CH1/N84S/Q39E/S183E/CLD201/hole/IE/RF
QVQLVQSGGGVVQPGRSLRLSCAASGVSLPDYGVSWVREAPGKGLEWVAVIWGSETTYYNSALKSRFTISRDNSKNTLYLQMSSLRAEDTAVYYCAKHYYYGGSFAMDYWGQGTLVTVSSASTKGPSVFPLAPSSKSTSGGTAALGCLVKDYFPEPVTVSWNSGALTSGVHTFPAVLQSSGLYSLESVVTVPSSSLGTQTYICNVNHKPSNTKVDKKVEPKSCTDWSPYADQSIKVRISLKSALGDKAYEWNDNEMYLFRSSVAYAMRQYFLKVKNQMILFGEEDVRVANLKPRISFNFFVTAPKNVSDIIPRTEVEKAIRMSRSRINDAFRLNDNSLEFLGIQPTLGPPNQPPVSTSTSPTRSMAPGAVHLPQPVSTRDKTHTCPPCPAPELLGGPSVFLFPPKPKDTLMISRTPEVTCVVVDVSHEDPEVKFNWYVDGVEVHNAKTKPREEQYNSTYRVVSVLTVLHQDWLNGKEYKCKVSNKALPAPEEKTISKAKGQPREPQVCTLPPSRDELTKNQVSLSCAVKGFYPSDIAVEWESNGQPENNYKTTPPVLDSDGSFFLVSKLTVDKSRWQQGNVFSCSVMHEALHNRFTQKSLSLSPG

SEQ ID NO: 4772 - protein, 438 aa, synthetic construct
  REGION 1..438: note = FMC60_VK-x-CH1/Q38E/S183K/knob/SIDE
DIQMTQSPSSLSASVGDRVTITCRASQDISKFLNWYQEKPGKAIKLLIYHTSRLHSGVPSRFSGSGSGTDFTLTISSLQPEDFATYYCQQGATLPYTFGPGTKVEIKSSASTKGPSVFPLAPSSKSTSGGTAALGCLVKDYFPEPVTVSWNSGALTSGVHTFPAVLQSSGLYSLKSVVTVPSSSLGTQTYICNVNHKPSNTKVDKKVEPKSCDKTHTCPPCPAPELLGGPDVFLFPPKPKDTLMISRTPEVTCVVVDVSHEDPEVKFNWYVDGVEVHNAKTKPREEQYNSTYRVVSVLTVLHQDWLNGKEYKCKVSNKALPAPEEKTISKAKGQPREPQVYTLPPCRDELTKNQVSLWCLVKGFYPSDIAVEWESNGQPENNYKTTPPVLDSDGSFFLYSKLTVDKSRWQQGNVFSCSVMHEALHNHYTQKSLSLSPG

SEQ ID NO: 4773 - protein, 438 aa, synthetic construct
  REGION 1..438: note = FMC60_VK-x-CH1/Q38K/S183K/knob/SIDE
DIQMTQSPSSLSASVGDRVTITCRASQDISKFLNWYQKKPGKAIKLLIYHTSRLHSGVPSRFSGSGSGTDFTLTISSLQPEDFATYYCQQGATLPYTFGPGTKVEIKSSASTKGPSVFPLAPSSKSTSGGTAALGCLVKDYFPEPVTVSWNSGALTSGVHTFPAVLQSSGLYSLKSVVTVPSSSLGTQTYICNVNHKPSNTKVDKKVEPKSCDKTHTCPPCPAPELLGGPDVFLFPPKPKDTLMISRTPEVTCVVVDVSHEDPEVKFNWYVDGVEVHNAKTKPREEQYNSTYRVVSVLTVLHQDWLNGKEYKCKVSNKALPAPEEKTISKAKGQPREPQVYTLPPCRDELTKNQVSLWCLVKGFYPSDIAVEWESNGQPENNYKTTPPVLDSDGSFFLYSKLTVDKSRWQQGNVFSCSVMHEALHNHYTQKSLSLSPG

SEQ ID NO: 4774 - protein, 606 aa, synthetic construct
  REGION 1..606: note = R_VH-CH1/Q39EK/S183E/CLD201/hole/SIDE/RF
QVQLQQPGAELVKPGASVKMSCKASGYTFTSYNMHWVKETPGRGLEWIGAIYPGNGDTSYNQKFKGKATLTADKSSSTAYMQLSSLTSEDSAVYYCARSTYYGGDWYFNVWGAGTTVTVSAASTKGPSVFPLAPSSKSTSGGTAALGCLVKDYFPEPVTVSWNSGALTSGVHTFPAVLQSSGLYSLESVVTVPSSSLGTQTYICNVNHKPSNTKVDKKVEPKSCTDWSPYADQSIKVRISLKSALGDKAYEWNDNEMYLFRSSVAYAMRQYFLKVKNQMILFGEEDVRVANLKPRISFNFFVTAPKNVSDIIPRTEVEKAIRMSRSRINDAFRLNDNSLEFLGIQPTLGPPNQPPVSTSTSPTRSMAPGAVHLPQPVSTRDKTHTCPPCPAPELLGGPDVFLFPPKPKDTLMISRTPEVTCVVVDVSHEDPEVKFNWYVDGVEVHNAKTKPREEQYNSTYRVVSVLTVLHQDWLNGKEYKCKVSNKALPAPEEKTISKAKGQPREPQVCTLPPSRDELTKNQVSLSCAVKGFYPSDIAVEWESNGQPENNYKTTPPVLDSDGSFFLVSKLTVDKSRWQQGNVFSCSVMHEALHNRFTQKSLSLSPG

SEQ ID NO: 4775 - protein, 605 aa, synthetic construct
  REGION 1..605: note = FMC47_VH-CH1/N84S/Q39K/S183E/CLD201/hole/SIDE/RF
QVQLVQSGGGVVQPGRSLRLSCAASGVSLPDYGVSWVRKAPGKGLEWVAVIWGSETTYYNSALKSRFTISRDNSKNTLYLQMSSLRAEDTAVYYCAKHYYYGGSFAMDYWGQGTLVTVSSASTKGPSVFPLAPSSKSTSGGTAALGCLVKDYFPEPVTVSWNSGALTSGVHTFPAVLQSSGLYSLESVVTVPSSSLGTQTYICNVNHKPSNTKVDKKVEPKSCTDWSPYADQSIKVRISLKSALGDKAYEWNDNEMYLFRSSVAYAMRQYFLKVKNQMILFGEEDVRVANLKPRISFNFFVTAPKNVSDIIPRTEVEKAIRMSRSRINDAFRLNDNSLEFLGIQPTLGPPNQPPVSTSTSPTRSMAPGAVHLPQPVSTRDKTHTCPPCPAPELLGGPDVFLFPPKPKDTLMISRTPEVTCVVVDVSHEDPEVKFNWYVDGVEVHNAKTKPREEQYNSTYRVVSVLTVLHQDWLNGKEYKCKVSNKALPAPEEKTISKAKGQPREPQVCTLPPSRDELTKNQVSLSCAVKGFYPSDIAVEWESNGQPENNYKTTPPVLDSDGSFFLVSKLTVDKSRWQQGNVFSCSVMHEALHNRFTQKSLSLSPG

SEQ ID NO: 4776 - protein, 605 aa, synthetic construct
  REGION 1..605: note = FMC47_VH-CH1/N84S/Q39E/S183E/CLD201/hole/SIDE/RF
QVQLVQSGGGVVQPGRSLRLSCAASGVSLPDYGVSWVREAPGKGLEWVAVIWGSETTYYNSALKSRFTISRDNSKNTLYLQMSSLRAEDTAVYYCAKHYYYGGSFAMDYWGQGTLVTVSSASTKGPSVFPLAPSSKSTSGGTAALGCLVKDYFPEPVTVSWNSGALTSGVHTFPAVLQSSGLYSLESVVTVPSSSLGTQTYICNVNHKPSNTKVDKKVEPKSCTDWSPYADQSIKVRISLKSALGDKAYEWNDNEMYLFRSSVAYAMRQYFLKVKNQMILFGEEDVRVANLKPRISFNFFVTAPKNVSDIIPRTEVEKAIRMSRSRINDAFRLNDNSLEFLGIQPTLGPPNQPPVSTSTSPTRSMAPGAVHLPQPVSTRDKTHTCPPCPAPELLGGPDVFLFPPKPKDTLMISRTPEVTCVVVDVSHEDPEVKFNWYVDGVEVHNAKTKPREEQYNSTYRVVSVLTVLHQDWLNGKEYKCKVSNKALPAPEEKTISKAKGQPREPQVCTLPPSRDELTKNQVSLSCAVKGFYPSDIAVEWESNGQPENNYKTTPPVLDSDGSFFLVSKLTVDKSRWQQGNVFSCSVMHEALHNRFTQKSLSLSPG

SEQ ID NO: 4777 - protein, 449 aa, synthetic construct
  REGION 1..449: note = FMC47_VH-CH/N84S
QVQLVQSGGGVVQPGRSLRLSCAASGVSLPDYGVSWVRQAPGKGLEWVAVIWGSETTYYNSALKSRFTISRDNSKNTLYLQMSSLRAEDTAVYYCAKHYYYGGSFAMDYWGQGTLVTVSSASTKGPSVFPLAPSSKSTSGGTAALGCLVKDYFPEPVTVSWNSGALTSGVHTFPAVLQSSGLYSLSSVVTVPSSSLGTQTYICNVNHKPSNTKVDKKVEPKSCDKTHTCPPCPAPELLGGPSVFLFPPKPKDTLMISRTPEVTCVVVDVSHEDPEVKFNWYVDGVEVHNAKTKPREEQYNSTYRVVSVLTVLHQDWLNGKEYKCKVSNKALPAPIEKTISKAKGQPREPQVYTLPPSRDELTKNQVSLTCLVKGFYPSDIAVEWESNGQPENNYKTTPPVLDSDGSFFLYSKLTVDKSRWQQGNVFSCSVMHEALHNHYTQKSLSLSPG

SEQ ID NO: 4778 - protein, 449 aa, synthetic construct
  REGION 1..449: note = FMC47_VH-CH/N84S/SIDE
QVQLVQSGGGVVQPGRSLRLSCAASGVSLPDYGVSWVRQAPGKGLEWVAVIWGSETTYYNSALKSRFTISRDNSKNTLYLQMSSLRAEDTAVYYCAKHYYYGGSFAMDYWGQGTLVTVSSASTKGPSVFPLAPSSKSTSGGTAALGCLVKDYFPEPVTVSWNSGALTSGVHTFPAVLQSSGLYSLSSVVTVPSSSLGTQTYICNVNHKPSNTKVDKKVEPKSCDKTHTCPPCPAPELLGGPDVFLFPPKPKDTLMISRTPEVTCVVVDVSHEDPEVKFNWYVDGVEVHNAKTKPREEQYNSTYRVVSVLTVLHQDWLNGKEYKCKVSNKALPAPEEKTISKAKGQPREPQVYTLPPSRDELTKNQVSLTCLVKGFYPSDIAVEWESNGQPENNYKTTPPVLDSDGSFFLYSKLTVDKSRWQQGNVFSCSVMHEALHNHYTQKSLSLSPG

SEQ ID NO: 4779 - protein, 605 aa, synthetic construct
  REGION 1..605: note = FMC47_VH-CH1/N84S/CLD201/hole/RF
QVQLVQSGGGVVQPGRSLRLSCAASGVSLPDYGVSWVRQAPGKGLEWVAVIWGSETTYYNSALKSRFTISRDNSKNTLYLQMSSLRAEDTAVYYCAKHYYYGGSFAMDYWGQGTLVTVSSASTKGPSVFPLAPSSKSTSGGTAALGCLVKDYFPEPVTVSWNSGALTSGVHTFPAVLQSSGLYSLSSVVTVPSSSLGTQTYICNVNHKPSNTKVDKKVEPKSCTDWSPYADQSIKVRISLKSALGDKAYEWNDNEMYLFRSSVAYAMRQYFLKVKNQMILFGEEDVRVANLKPRISFNFFVTAPKNVSDIIPRTEVEKAIRMSRSRINDAFRLNDNSLEFLGIQPTLGPPNQPPVSTSTSPTRSMAPGAVHLPQPVSTRDKTHTCPPCPAPELLGGPSVFLFPPKPKDTLMISRTPEVTCVVVDVSHEDPEVKFNWYVDGVEVHNAKTKPREEQYNSTYRVVSVLTVLHQDWLNGKEYKCKVSNKALPAPIEKTISKAKGQPREPQVCTLPPSRDELTKNQVSLSCAVKGFYPSDIAVEWESNGQPENNYKTTPPVLDSDGSFFLVSKLTVDKSRWQQGNVFSCSVMHEALHNRFTQKSLSLSPG

SEQ ID NO: 4780 - protein, 449 aa, synthetic construct
  REGION 1..449: note = FMC47_VH-CH1/N84S/knob
QVQLVQSGGGVVQPGRSLRLSCAASGVSLPDYGVSWVRQAPGKGLEWVAVIWGSETTYYNSALKSRFTISRDNSKNTLYLQMSSLRAEDTAVYYCAKHYYYGGSFAMDYWGQGTLVTVSSASTKGPSVFPLAPSSKSTSGGTAALGCLVKDYFPEPVTVSWNSGALTSGVHTFPAVLQSSGLYSLSSVVTVPSSSLGTQTYICNVNHKPSNTKVDKKVEPKSCDKTHTCPPCPAPELLGGPSVFLFPPKPKDTLMISRTPEVTCVVVDVSHEDPEVKFNWYVDGVEVHNAKTKPREEQYNSTYRVVSVLTVLHQDWLNGKEYKCKVSNKALPAPIEKTISKAKGQPREPQVYTLPPCRDELTKNQVSLWCLVKGFYPSDIAVEWESNGQPENNYKTTPPVLDSDGSFFLYSKLTVDKSRWQQGNVFSCSVMHEALHNHYTQKSLSLSPG

SEQ ID NO: 4781 - protein, 605 aa, synthetic construct
  REGION 1..605: note = FMC47_VH-CH1/N84S/CLD201/hole/SD/RF
QVQLVQSGGGVVQPGRSLRLSCAASGVSLPDYGVSWVRQAPGKGLEWVAVIWGSETTYYNSALKSRFTISRDNSKNTLYLQMSSLRAEDTAVYYCAKHYYYGGSFAMDYWGQGTLVTVSSASTKGPSVFPLAPSSKSTSGGTAALGCLVKDYFPEPVTVSWNSGALTSGVHTFPAVLQSSGLYSLSSVVTVPSSSLGTQTYICNVNHKPSNTKVDKKVEPKSCTDWSPYADQSIKVRISLKSALGDKAYEWNDNEMYLFRSSVAYAMRQYFLKVKNQMILFGEEDVRVANLKPRISFNFFVTAPKNVSDIIPRTEVEKAIRMSRSRINDAFRLNDNSLEFLGIQPTLGPPNQPPVSTSTSPTRSMAPGAVHLPQPVSTRDKTHTCPPCPAPELLGGPDVFLFPPKPKDTLMISRTPEVTCVVVDVSHEDPEVKFNWYVDGVEVHNAKTKPREEQYNSTYRVVSVLTVLHQDWLNGKEYKCKVSNKALPAPIEKTISKAKGQPREPQVCTLPPSRDELTKNQVSLSCAVKGFYPSDIAVEWESNGQPENNYKTTPPVLDSDGSFFLVSKLTVDKSRWQQGNVFSCSVMHEALHNRFTQKSLSLSPG

SEQ ID NO: 4782 - protein, 449 aa, synthetic construct
  REGION 1..449: note = FMC47_VH-CH1/N84S/knob/IE
QVQLVQSGGGVVQPGRSLRLSCAASGVSLPDYGVSWVRQAPGKGLEWVAVIWGSETTYYNSALKSRFTISRDNSKNTLYLQMSSLRAEDTAVYYCAKHYYYGGSFAMDYWGQGTLVTVSSASTKGPSVFPLAPSSKSTSGGTAALGCLVKDYFPEPVTVSWNSGALTSGVHTFPAVLQSSGLYSLSSVVTVPSSSLGTQTYICNVNHKPSNTKVDKKVEPKSCDKTHTCPPCPAPELLGGPSVFLFPPKPKDTLMISRTPEVTCVVVDVSHEDPEVKFNWYVDGVEVHNAKTKPREEQYNSTYRVVSVLTVLHQDWLNGKEYKCKVSNKALPAPEEKTISKAKGQPREPQVYTLPPCRDELTKNQVSLWCLVKGFYPSDIAVEWESNGQPENNYKTTPPVLDSDGSFFLYSKLTVDKSRWQQGNVFSCSVMHEALHNHYTQKSLSLSPG

SEQ ID NO: 4783 - protein, 605 aa, synthetic construct
  REGION 1..605: note = FMC47_VH-CH1/N84S/CLD201/hole/IE/RF
QVQLVQSGGGVVQPGRSLRLSCAASGVSLPDYGVSWVRQAPGKGLEWVAVIWGSETTYYNSALKSRFTISRDNSKNTLYLQMSSLRAEDTAVYYCAKHYYYGGSFAMDYWGQGTLVTVSSASTKGPSVFPLAPSSKSTSGGTAALGCLVKDYFPEPVTVSWNSGALTSGVHTFPAVLQSSGLYSLSSVVTVPSSSLGTQTYICNVNHKPSNTKVDKKVEPKSCTDWSPYADQSIKVRISLKSALGDKAYEWNDNEMYLFRSSVAYAMRQYFLKVKNQMILFGEEDVRVANLKPRISFNFFVTAPKNVSDIIPRTEVEKAIRMSRSRINDAFRLNDNSLEFLGIQPTLGPPNQPPVSTSTSPTRSMAPGAVHLPQPVSTRDKTHTCPPCPAPELLGGPSVFLFPPKPKDTLMISRTPEVTCVVVDVSHEDPEVKFNWYVDGVEVHNAKTKPREEQYNSTYRVVSVLTVLHQDWLNGKEYKCKVSNKALPAPEEKTISKAKGQPREPQVCTLPPSRDELTKNQVSLSCAVKGFYPSDIAVEWESNGQPENNYKTTPPVLDSDGSFFLVSKLTVDKSRWQQGNVFSCSVMHEALHNRFTQKSLSLSPG

SEQ ID NO: 4784 - protein, 449 aa, synthetic construct
  REGION 1..449: note = FMC47_VH-CH1/N84S/knob/SD
QVQLVQSGGGVVQPGRSLRLSCAASGVSLPDYGVSWVRQAPGKGLEWVAVIWGSETTYYNSALKSRFTISRDNSKNTLYLQMSSLRAEDTAVYYCAKHYYYGGSFAMDYWGQGTLVTVSSASTKGPSVFPLAPSSKSTSGGTAALGCLVKDYFPEPVTVSWNSGALTSGVHTFPAVLQSSGLYSLSSVVTVPSSSLGTQTYICNVNHKPSNTKVDKKVEPKSCDKTHTCPPCPAPELLGGPDVFLFPPKPKDTLMISRTPEVTCVVVDVSHEDPEVKFNWYVDGVEVHNAKTKPREEQYNSTYRVVSVLTVLHQDWLNGKEYKCKVSNKALPAPIEKTISKAKGQPREPQVYTLPPCRDELTKNQVSLWCLVKGFYPSDIAVEWESNGQPENNYKTTPPVLDSDGSFFLYSKLTVDKSRWQQGNVFSCSVMHEALHNHYTQKSLSLSPG

SEQ ID NO: 4785 - protein, 605 aa, synthetic construct
  REGION 1..605: note = FMC47_VH-CH1/N84S/CLD201/hole/SIDE/RF
QVQLVQSGGGVVQPGRSLRLSCAASGVSLPDYGVSWVRQAPGKGLEWVAVIWGSETTYYNSALKSRFTISRDNSKNTLYLQMSSLRAEDTAVYYCAKHYYYGGSFAMDYWGQGTLVTVSSASTKGPSVFPLAPSSKSTSGGTAALGCLVKDYFPEPVTVSWNSGALTSGVHTFPAVLQSSGLYSLSSVVTVPSSSLGTQTYICNVNHKPSNTKVDKKVEPKSCTDWSPYADQSIKVRISLKSALGDKAYEWNDNEMYLFRSSVAYAMRQYFLKVKNQMILFGEEDVRVANLKPRISFNFFVTAPKNVSDIIPRTEVEKAIRMSRSRINDAFRLNDNSLEFLGIQPTLGPPNQPPVSTSTSPTRSMAPGAVHLPQPVSTRDKTHTCPPCPAPELLGGPDVFLFPPKPKDTLMISRTPEVTCVVVDVSHEDPEVKFNWYVDGVEVHNAKTKPREEQYNSTYRVVSVLTVLHQDWLNGKEYKCKVSNKALPAPEEKTISKAKGQPREPQVCTLPPSRDELTKNQVSLSCAVKGFYPSDIAVEWESNGQPENNYKTTPPVLDSDGSFFLVSKLTVDKSRWQQGNVFSCSVMHEALHNRFTQKSLSLSPG

SEQ ID NO: 4786 - protein, 449 aa, synthetic construct
  REGION 1..449: note = FMC47_VH-CH1/N84S/knob/SIDE
QVQLVQSGGGVVQPGRSLRLSCAASGVSLPDYGVSWVRQAPGKGLEWVAVIWGSETTYYNSALKSRFTISRDNSKNTLYLQMSSLRAEDTAVYYCAKHYYYGGSFAMDYWGQGTLVTVSSASTKGPSVFPLAPSSKSTSGGTAALGCLVKDYFPEPVTVSWNSGALTSGVHTFPAVLQSSGLYSLSSVVTVPSSSLGTQTYICNVNHKPSNTKVDKKVEPKSCDKTHTCPPCPAPELLGGPDVFLFPPKPKDTLMISRTPEVTCVVVDVSHEDPEVKFNWYVDGVEVHNAKTKPREEQYNSTYRVVSVLTVLHQDWLNGKEYKCKVSNKALPAPEEKTISKAKGQPREPQVYTLPPCRDELTKNQVSLWCLVKGFYPSDIAVEWESNGQPENNYKTTPPVLDSDGSFFLYSKLTVDKSRWQQGNVFSCSVMHEALHNHYTQKSLSLSPG

SEQ ID NO: 4787 - protein, 438 aa, synthetic construct
  REGION 1..438: note = FMC59_VK-x-CH1/Q38E/S183K/knob
DIQMTQSPSSLSASVGDRVTITCRASQDISKYLNWYQEKPGKAIKLLIYHTSRLHSGVPSRFSGSGSGTDFTLTISSLQPEDFATYYCQQGATLPYTFGPGTKVEIKSSASTKGPSVFPLAPSSKSTSGGTAALGCLVKDYFPEPVTVSWNSGALTSGVHTFPAVLQSSGLYSLKSVVTVPSSSLGTQTYICNVNHKPSNTKVDKKVEPKSCDKTHTCPPCPAPELLGGPSVFLFPPKPKDTLMISRTPEVTCVVVDVSHEDPEVKFNWYVDGVEVHNAKTKPREEQYNSTYRVVSVLTVLHQDWLNGKEYKCKVSNKALPAPIEKTISKAKGQPREPQVYTLPPCRDELTKNQVSLWCLVKGFYPSDIAVEWESNGQPENNYKTTPPVLDSDGSFFLYSKLTVDKSRWQQGNVFSCSVMHEALHNHYTQKSLSLSPG

SEQ ID NO: 4788 - protein, 438 aa, synthetic construct
  REGION 1..438: note = FMC59_VK-x-CH1/Q38K/S183K/knob
DIQMTQSPSSLSASVGDRVTITCRASQDISKYLNWYQKKPGKAIKLLIYHTSRLHSGVPSRFSGSGSGTDFTLTISSLQPEDFATYYCQQGATLPYTFGPGTKVEIKSSASTKGPSVFPLAPSSKSTSGGTAALGCLVKDYFPEPVTVSWNSGALTSGVHTFPAVLQSSGLYSLKSVVTVPSSSLGTQTYICNVNHKPSNTKVDKKVEPKSCDKTHTCPPCPAPELLGGPSVFLFPPKPKDTLMISRTPEVTCVVVDVSHEDPEVKFNWYVDGVEVHNAKTKPREEQYNSTYRVVSVLTVLHQDWLNGKEYKCKVSNKALPAPIEKTISKAKGQPREPQVYTLPPCRDELTKNQVSLWCLVKGFYPSDIAVEWESNGQPENNYKTTPPVLDSDGSFFLYSKLTVDKSRWQQGNVFSCSVMHEALHNHYTQKSLSLSPG

SEQ ID NO: 4789 - protein, 438 aa, synthetic construct
  REGION 1..438: note = FMC59_VK-x-CH1/Q38E/S183K/knob/IE
DIQMTQSPSSLSASVGDRVTITCRASQDISKYLNWYQEKPGKAIKLLIYHTSRLHSGVPSRFSGSGSGTDFTLTISSLQPEDFATYYCQQGATLPYTFGPGTKVEIKSSASTKGPSVFPLAPSSKSTSGGTAALGCLVKDYFPEPVTVSWNSGALTSGVHTFPAVLQSSGLYSLKSVVTVPSSSLGTQTYICNVNHKPSNTKVDKKVEPKSCDKTHTCPPCPAPELLGGPSVFLFPPKPKDTLMISRTPEVTCVVVDVSHEDPEVKFNWYVDGVEVHNAKTKPREEQYNSTYRVVSVLTVLHQDWLNGKEYKCKVSNKALPAPEEKTISKAKGQPREPQVYTLPPCRDELTKNQVSLWCLVKGFYPSDIAVEWESNGQPENNYKTTPPVLDSDGSFFLYSKLTVDKSRWQQGNVFSCSVMHEALHNHYTQKSLSLSPG

SEQ ID NO: 4790 - protein, 438 aa, synthetic construct
  REGION 1..438: note = FMC59_VK-x-CH1/Q38K/S183K/knob/IE
DIQMTQSPSSLSASVGDRVTITCRASQDISKYLNWYQKKPGKAIKLLIYHTSRLHSGVPSRFSGSGSGTDFTLTISSLQPEDFATYYCQQGATLPYTFGPGTKVEIKSSASTKGPSVFPLAPSSKSTSGGTAALGCLVKDYFPEPVTVSWNSGALTSGVHTFPAVLQSSGLYSLKSVVTVPSSSLGTQTYICNVNHKPSNTKVDKKVEPKSCDKTHTCPPCPAPELLGGPSVFLFPPKPKDTLMISRTPEVTCVVVDVSHEDPEVKFNWYVDGVEVHNAKTKPREEQYNSTYRVVSVLTVLHQDWLNGKEYKCKVSNKALPAPEEKTISKAKGQPREPQVYTLPPCRDELTKNQVSLWCLVKGFYPSDIAVEWESNGQPENNYKTTPPVLDSDGSFFLYSKLTVDKSRWQQGNVFSCSVMHEALHNHYTQKSLSLSPG

SEQ ID NO: 4791 - protein, 438 aa, synthetic construct
  REGION 1..438: note = FMC59_VK-x-CH1/Q38E/S183K/knob/SD
DIQMTQSPSSLSASVGDRVTITCRASQDISKYLNWYQEKPGKAIKLLIYHTSRLHSGVPSRFSGSGSGTDFTLTISSLQPEDFATYYCQQGATLPYTFGPGTKVEIKSSASTKGPSVFPLAPSSKSTSGGTAALGCLVKDYFPEPVTVSWNSGALTSGVHTFPAVLQSSGLYSLKSVVTVPSSSLGTQTYICNVNHKPSNTKVDKKVEPKSCDKTHTCPPCPAPELLGGPDVFLFPPKPKDTLMISRTPEVTCVVVDVSHEDPEVKFNWYVDGVEVHNAKTKPREEQYNSTYRVVSVLTVLHQDWLNGKEYKCKVSNKALPAPIEKTISKAKGQPREPQVYTLPPCRDELTKNQVSLWCLVKGFYPSDIAVEWESNGQPENNYKTTPPVLDSDGSFFLYSKLTVDKSRWQQGNVFSCSVMHEALHNHYTQKSLSLSPG

SEQ ID NO: 4792 - protein, 438 aa, synthetic construct
  REGION 1..438: note = FMC59_VK-x-CH1/Q38K/S183K/knob/SD
DIQMTQSPSSLSASVGDRVTITCRASQDISKYLNWYQKKPGKAIKLLIYHTSRLHSGVPSRFSGSGSGTDFTLTISSLQPEDFATYYCQQGATLPYTFGPGTKVEIKSSASTKGPSVFPLAPSSKSTSGGTAALGCLVKDYFPEPVTVSWNSGALTSGVHTFPAVLQSSGLYSLKSVVTVPSSSLGTQTYICNVNHKPSNTKVDKKVEPKSCDKTHTCPPCPAPELLGGPDVFLFPPKPKDTLMISRTPEVTCVVVDVSHEDPEVKFNWYVDGVEVHNAKTKPREEQYNSTYRVVSVLTVLHQDWLNGKEYKCKVSNKALPAPIEKTISKAKGQPREPQVYTLPPCRDELTKNQVSLWCLVKGFYPSDIAVEWESNGQPENNYKTTPPVLDSDGSFFLYSKLTVDKSRWQQGNVFSCSVMHEALHNHYTQKSLSLSPG

SEQ ID NO: 4793 - protein, 438 aa, synthetic construct
  REGION 1..438: note = FMC59_VK-x-CH1/Q38E/S183K/knob/SIDE
DIQMTQSPSSLSASVGDRVTITCRASQDISKYLNWYQEKPGKAIKLLIYHTSRLHSGVPSRFSGSGSGTDFTLTISSLQPEDFATYYCQQGATLPYTFGPGTKVEIKSSASTKGPSVFPLAPSSKSTSGGTAALGCLVKDYFPEPVTVSWNSGALTSGVHTFPAVLQSSGLYSLKSVVTVPSSSLGTQTYICNVNHKPSNTKVDKKVEPKSCDKTHTCPPCPAPELLGGPDVFLFPPKPKDTLMISRTPEVTCVVVDVSHEDPEVKFNWYVDGVEVHNAKTKPREEQYNSTYRVVSVLTVLHQDWLNGKEYKCKVSNKALPAPEEKTISKAKGQPREPQVYTLPPCRDELTKNQVSLWCLVKGFYPSDIAVEWESNGQPENNYKTTPPVLDSDGSFFLYSKLTVDKSRWQQGNVFSCSVMHEALHNHYTQKSLSLSPG

SEQ ID NO: 4794 - protein, 438 aa, synthetic construct
  REGION 1..438: note = FMC59_VK-x-CH1/Q38K/S183K/knob/SIDE
DIQMTQSPSSLSASVGDRVTITCRASQDISKYLNWYQKKPGKAIKLLIYHTSRLHSGVPSRFSGSGSGTDFTLTISSLQPEDFATYYCQQGATLPYTFGPGTKVEIKSSASTKGPSVFPLAPSSKSTSGGTAALGCLVKDYFPEPVTVSWNSGALTSGVHTFPAVLQSSGLYSLKSVVTVPSSSLGTQTYICNVNHKPSNTKVDKKVEPKSCDKTHTCPPCPAPELLGGPDVFLFPPKPKDTLMISRTPEVTCVVVDVSHEDPEVKFNWYVDGVEVHNAKTKPREEQYNSTYRVVSVLTVLHQDWLNGKEYKCKVSNKALPAPEEKTISKAKGQPREPQVYTLPPCRDELTKNQVSLWCLVKGFYPSDIAVEWESNGQPENNYKTTPPVLDSDGSFFLYSKLTVDKSRWQQGNVFSCSVMHEALHNHYTQKSLSLSPG

SEQ ID NO: 4795 - protein, 606 aa, synthetic construct; identical to SEQ ID NO: 593
  REGION 1..606: note = B13A_VH-CH1/N84S/Q39K/S183E/CLD201/hole/RF

SEQ ID NO: 4796 - protein, 442 aa, synthetic construct; identical to SEQ ID NO: 594
  REGION 1..442: note = O24A_VK-x-CH1/Q38E/S183K/knob

SEQ ID NO: 4797 - protein, 442 aa, synthetic construct; identical to SEQ ID NO: 595
  REGION 1..442: note = O24A_VK-x-CH1/Q38K/S183K/knob

SEQ ID NO: 4798 - protein, 603 aa, synthetic construct; identical to SEQ ID NO: 603
  REGION 1..603: note = O24A_VH-CH1/N84S/Q39K/S183E/CLD201/hole/RF

SEQ ID NO: 4799 - protein, 438 aa, synthetic construct; identical to SEQ ID NO: 604
  REGION 1..438: note = B13A_VK-x-CH1/Q38E/S183K/knob

SEQ ID NO: 4800 - protein, 438 aa, synthetic construct; identical to SEQ ID NO: 605
  REGION 1..438: note = B13A_VK-x-CH1/Q38K/S183K/knob

SEQ ID NO: 4801 - protein, 213 aa, synthetic construct; identical to SEQ ID NO: 733
  REGION 1..213: note = R_VK-Ck/E123R/Q124K

SEQ ID NO: 4802 - protein, 227 aa, synthetic construct; identical to SEQ ID NO: 734
  REGION 1..227: note = FMC63_VH-x-CK/N84S

SEQ ID NO: 4803 - protein, 213 aa, synthetic construct; identical to SEQ ID NO: 735
  REGION 1..213: note = R_VK-CK/Q38E/V133K

SEQ ID NO: 4804 - protein, 227 aa, synthetic construct; identical to SEQ ID NO: 736
  REGION 1..227: note = FMC63_VH-x-CK/N84S/Q39K/V133E

SEQ ID NO: 4805 - protein, 227 aa, synthetic construct; identical to SEQ ID NO: 737
  REGION 1..227: note = FMC63_VH-x-CK/N84S/Q39E/V133E

SEQ ID NO: 4806 - protein, 214 aa, synthetic construct; identical to SEQ ID NO: 738
  REGION 1..214: note = FMC63_VK-Ck/E123R/Q124K

SEQ ID NO: 4807 - protein, 228 aa, synthetic construct; identical to SEQ ID NO: 739
  REGION 1..228: note = R_VH-x-CK

SEQ ID NO: 4808 - protein, 214 aa, synthetic construct; identical to SEQ ID NO: 740
  REGION 1..214: note = FMC63_VK-CK/Q38E/V133K

SEQ ID NO: 4809 - protein, 228 aa, synthetic construct; identical to SEQ ID NO: 741
  REGION 1..228: note = R_VH-x-CK/Q39K/V133E

SEQ ID NO: 4810 - protein, 228 aa, synthetic construct; identical to SEQ ID NO: 742
  REGION 1..228: note = R_VH-x-CK/Q39E/V133E

SEQ ID NO: 4811 - protein, 213 aa, synthetic construct; identical to SEQ ID NO: 1
  REGION 1..213: note = R_VK-Ck

SEQ ID NO: 4812 - protein, 214 aa, synthetic construct
  REGION 1..214: note = FMC63_VK-Ck
DIQMTQTTSSLSASLGDRVTISCRASQDISKYLNWYQQKPDGTVKLLIYHTSRLHSGVPSRFSGSGSGTDYSLTISNLEQEDIATYFCQQGNTLPYTFGGGTKLEIKRTVAAPSVFIFPPSDEQLKSGTASVVCLLNNFYPREAKVQWKVDNALQSGNSQESVTEQDSKDSTYSLSSTLTLSKADYEKHKVYACEVTHQGLSSPVTKSFNRGEC

SEQ ID NO: 4813 - protein, 227 aa, synthetic construct
  REGION 1..227: note = FMC47_VH-x-CK/N84S/Q39K/V133E
QVQLVQSGGGVVQPGRSLRLSCAASGVSLPDYGVSWVRKAPGKGLEWVAVIWGSETTYYNSALKSRFTISRDNSKNTLYLQMSSLRAEDTAVYYCAKHYYYGGSFAMDYWGQGTLVTVSSASVAAPSVFIFPPSDEQLKSGTASVECLLNNFYPREAKVQWKVDNALQSGNSQESVTEQDSKDSTYSLSSTLTLSKADYEKHKVYACEVTHQGLSSPVTKSFNRGEC

SEQ ID NO: 4814 - protein, 227 aa, synthetic construct
  REGION 1..227: note = FMC47_VH-x-CK/N84S/Q39E/V133E
QVQLVQSGGGVVQPGRSLRLSCAASGVSLPDYGVSWVREAPGKGLEWVAVIWGSETTYYNSALKSRFTISRDNSKNTLYLQMSSLRAEDTAVYYCAKHYYYGGSFAMDYWGQGTLVTVSSASVAAPSVFIFPPSDEQLKSGTASVECLLNNFYPREAKVQWKVDNALQSGNSQESVTEQDSKDSTYSLSSTLTLSKADYEKHKVYACEVTHQGLSSPVTKSFNRGEC

SEQ ID NO: 4815 - protein, 213 aa, synthetic construct
  REGION 1..213: note = R_VK-CK/Q38K/V133K
QIVLSQSPAILSASPGEKVTMTCRASSSVSYIHWFQKKPGSSPKPWIYATSNLASGVPVRFSGSGSGTSYSLTISRVEAEDAATYYCQQWTSNPPTFGGGTKLEIKRTVAAPSVFIFPPSDEQLKSGTASVKCLLNNFYPREAKVQWKVDNALQSGNSQESVTEQDSKDSTYSLSSTLTLSKADYEKHKVYACEVTHQGLSSPVTKSFNRGEC

SEQ ID NO: 4816 - protein, 214 aa, synthetic construct
  REGION 1..214: note = FMC60_VK-CK/Q38E/V133K
DIQMTQSPSSLSASVGDRVTITCRASQDISKFLNWYQEKPGKAIKLLIYHTSRLHSGVPSRFSGSGSGTDFTLTISSLQPEDFATYYCQQGATLPYTFGPGTKLEIKRTVAAPSVFIFPPSDEQLKSGTASVKCLLNNFYPREAKVQWKVDNALQSGNSQESVTEQDSKDSTYSLSSTLTLSKADYEKHKVYACEVTHQGLSSPVTKSFNRGEC

SEQ ID NO: 4817 - protein, 214 aa, synthetic construct
  REGION 1..214: note = FMC60_VK-CK/Q38K/V133K
DIQMTQSPSSLSASVGDRVTITCRASQDISKFLNWYQKKPGKAIKLLIYHTSRLHSGVPSRFSGSGSGTDFTLTISSLQPEDFATYYCQQGATLPYTFGPGTKLEIKRTVAAPSVFIFPPSDEQLKSGTASVKCLLNNFYPREAKVQWKVDNALQSGNSQESVTEQDSKDSTYSLSSTLTLSKADYEKHKVYACEVTHQGLSSPVTKSFNRGEC

SEQ ID NO: 4818 - protein, 214 aa, synthetic construct
  REGION 1..214: note = FMC60_VK-Ck
DIQMTQSPSSLSASVGDRVTITCRASQDISKFLNWYQQKPGKAIKLLIYHTSRLHSGVPSRFSGSGSGTDFTLTISSLQPEDFATYYCQQGATLPYTFGPGTKLEIKRTVAAPSVFIFPPSDEQLKSGTASVVCLLNNFYPREAKVQWKVDNALQSGNSQESVTEQDSKDSTYSLSSTLTLSKADYEKHKVYACEVTHQGLSSPVTKSFNRGEC

SEQ ID NO: 4819 - protein, 214 aa, synthetic construct
  REGION 1..214: note = FMC59_VK-CK/Q38E/V133K
DIQMTQSPSSLSASVGDRVTITCRASQDISKYLNWYQEKPGKAIKLLIYHTSRLHSGVPSRFSGSGSGTDFTLTISSLQPEDFATYYCQQGATLPYTFGPGTKLEIKRTVAAPSVFIFPPSDEQLKSGTASVKCLLNNFYPREAKVQWKVDNALQSGNSQESVTEQDSKDSTYSLSSTLTLSKADYEKHKVYACEVTHQGLSSPVTKSFNRGEC

SEQ ID NO: 4820 - protein, 214 aa, synthetic construct
  REGION 1..214: note = FMC59_VK-CK/Q38K/V133K
DIQMTQSPSSLSASVGDRVTITCRASQDISKYLNWYQKKPGKAIKLLIYHTSRLHSGVPSRFSGSGSGTDFTLTISSLQPEDFATYYCQQGATLPYTFGPGTKLEIKRTVAAPSVFIFPPSDEQLKSGTASVKCLLNNFYPREAKVQWKVDNALQSGNSQESVTEQDSKDSTYSLSSTLTLSKADYEKHKVYACEVTHQGLSSPVTKSFNRGEC

SEQ ID NO: 4821 - protein, 214 aa, synthetic construct
  REGION 1..214: note = FMC59_VK-Ck
DIQMTQSPSSLSASVGDRVTITCRASQDISKYLNWYQQKPGKAIKLLIYHTSRLHSGVPSRFSGSGSGTDFTLTISSLQPEDFATYYCQQGATLPYTFGPGTKLEIKRTVAAPSVFIFPPSDEQLKSGTASVVCLLNNFYPREAKVQWKVDNALQSGNSQESVTEQDSKDSTYSLSSTLTLSKADYEKHKVYACEVTHQGLSSPVTKSFNRGEC

SEQ ID NO: 4822 - protein, 214 aa, synthetic construct; identical to SEQ ID NO: 633
  REGION 1..214: note = B13A_VK-CK/Q38E/V133K

SEQ ID NO: 4823 - protein, 225 aa, synthetic construct; identical to SEQ ID NO: 634
  REGION 1..225: note = O24A_VH-x-CK/Q39K/V133E

SEQ ID NO: 4824 - protein, 225 aa, synthetic construct; identical to SEQ ID NO: 635
  REGION 1..225: note = O24A_VH-x-CK/Q39E/V133E

SEQ ID NO: 4825 - protein, 218 aa, synthetic construct; identical to SEQ ID NO: 638
  REGION 1..218: note = O24A_VK-CK/Q38E/V133K

SEQ ID NO: 4826 - protein, 228 aa, synthetic construct; identical to SEQ ID NO: 639
  REGION 1..228: note = B13A_VH-x-CK/Q39K/V133E

SEQ ID NO: 4827 - protein, 228 aa, synthetic construct; identical to SEQ ID NO: 640
  REGION 1..228: note = B13A_VH-x-CK/Q39E/V133E

SEQ ID NO: 4828 - protein, 221 aa, synthetic construct
  REGION 1..221: note = Fc6/knob
CPPCPAPELLGGPSVFLFPPKPKDTLMISRTPEVTCVVVDVSHEDPEVKFNWYVDGVEVHNAKTKPREEQYNSTYRVVSVLTVLHQDWLNGKEYKCKVSNKALPAPIEKTISKAKGQPREPQVYTLPPCRDELTKNQVSLWCLVKGFYPSDIAVEWESNGQPENNYKTTPPVLDSDGSFFLYSKLTVDKSRWQQGNVFSCSVMHEALHNHYTQKSLSLSPG

SEQ ID NO: 4829 - protein, 221 aa, synthetic construct
  REGION 1..221: note = Fc6/knob/SIDE
CPPCPAPELLGGPDVFLFPPKPKDTLMISRTPEVTCVVVDVSHEDPEVKFNWYVDGVEVHNAKTKPREEQYNSTYRVVSVLTVLHQDWLNGKEYKCKVSNKALPAPEEKTISKAKGQPREPQVYTLPPCRDELTKNQVSLWCLVKGFYPSDIAVEWESNGQPENNYKTTPPVLDSDGSFFLYSKLTVDKSRWQQGNVFSCSVMHEALHNHYTQKSLSLSPG

SEQ ID NO: 4830 - protein, 453 aa, synthetic construct
  REGION 1..453: note = ADG-20_VH-CH
EVQLVESGGGLVKPGGSLRLSCAASGFTFSSYYMNWVRQAPGKGLEWVSSISEDGYSTYYPDSLKGRFTISRDSAKNSLYLQMNSLRADDTAVYYCARDFSGHTAWAGTGFEYWGQGTLVTVSSASTKGPSVFPLAPSSKSTSGGTAALGCLVKDYFPEPVTVSWNSGALTSGVHTFPAVLQSSGLYSLSSVVTVPSSSLGTQTYICNVNHKPSNTKVDKRVEPKSCDKTHTCPPCPAPELLGGPSVFLFPPKPKDTLMISRTPEVTCVVVDVSHEDPEVKFNWYVDGVEVHNAKTKPREEQYNSTYRVVSVLTVLHQDWLNGKEYKCKVSNKALPAPIEKTISKAKGQPREPQVYTLPPSREEMTKNQVSLTCLVKGFYPSDIAVEWESNGQPENNYKTTPPVLDSDGSFFLYSKLTVDKSRWQQGNVFSCSVLHEALHAHYTQKSLSLSPG

SEQ ID NO: 4831 - protein, 450 aa, synthetic construct
  REGION 1..450: note = Ta_VH-CH/SIDE
EVQLVESGGGLVKPGGSLKLSCAASGYTFTSYVMHWVRQAPGKGLEWIGYINPYNDGTKYNEKFQGRVTISSDKSISTAYMELSSLRSEDTAMYYCARGTYYYGTRVFDYWGQGTLVTVSSASTKGPSVFPLAPSSKSTSGGTAALGCLVKDYFPEPVTVSWNSGALTSGVHTFPAVLQSSGLYSLSSVVTVPSSSLGTQTYICNVNHKPSNTKVDKKVEPKSCDKTHTCPPCPAPELLGGPDVFLFPPKPKDTLMISRTPEVTCVVVDVSHEDPEVQFNWYVDGVEVHNAKTKPREEQFNSTFRVVSVLTVVHQDWLNGKEYKCKVSNKALPAPEEKTISKTKGQPREPQVYTLPPSREEMTKNQVSLTCLVKGFYPSDIAVEWESNGQPENNYKTTPPMLDSDGSFFLYSKLTVDKSRWQQGNVFSCSVMHEALHNHYTQKSLSLSPG

SEQ ID NO: 4832 - protein, 453 aa, synthetic construct
  REGION 1..453: note = M971_VH-CH
QVQLQQSGPGLVKPSQTLSLTCAISGDSVSSNSAAWNWIRQSPSRGLEWLGRTYYRSKWYNDYAVSVKSRITINPDTSKNQFSLQLNSVTPEDTAVYYCAREVTGDLEDAFDIWGQGTMVTVSSASTKGPSVFPLAPSSKSTSGGTAALGCLVKDYFPEPVTVSWNSGALTSGVHTFPAVLQSSGLYSLSSVVTVPSSSLGTQTYICNVNHKPSNTKVDKKVEPKSCDKTHTCPPCPAPELLGGPSVFLFPPKPKDTLMISRTPEVTCVVVDVSHEDPEVKFNWYVDGVEVHNAKTKPREEQYNSTYRVVSVLTVLHQDWLNGKEYKCKVSNKALPAPIEKTISKAKGQPREPQVYTLPPSRDELTKNQVSLTCLVKGFYPSDIAVEWESNGQPENNYKTTPPVLDSDGSFFLYSKLTVDKSRWQQGNVFSCSVMHEALHNHYTQKSLSLSPG

SEQ ID NO: 4833 - protein, 453 aa, synthetic construct
  REGION 1..453: note = M971_VH-CH/SIDE
QVQLQQSGPGLVKPSQTLSLTCAISGDSVSSNSAAWNWIRQSPSRGLEWLGRTYYRSKWYNDYAVSVKSRITINPDTSKNQFSLQLNSVTPEDTAVYYCAREVTGDLEDAFDIWGQGTMVTVSSASTKGPSVFPLAPSSKSTSGGTAALGCLVKDYFPEPVTVSWNSGALTSGVHTFPAVLQSSGLYSLSSVVTVPSSSLGTQTYICNVNHKPSNTKVDKKVEPKSCDKTHTCPPCPAPELLGGPDVFLFPPKPKDTLMISRTPEVTCVVVDVSHEDPEVKFNWYVDGVEVHNAKTKPREEQYNSTYRVVSVLTVLHQDWLNGKEYKCKVSNKALPAPEEKTISKAKGQPREPQVYTLPPSRDELTKNQVSLTCLVKGFYPSDIAVEWESNGQPENNYKTTPPVLDSDGSFFLYSKLTVDKSRWQQGNVFSCSVMHEALHNHYTQKSLSLSPG

SEQ ID NO: 4834 - protein, 451 aa, synthetic construct
  REGION 1..451: note = Of_VH-CH
EVQLVESGGGLVQPGRSLRLSCAASGFTFNDYAMHWVRQAPGKGLEWVSTISWNSGSIGYADSVKGRFTISRDNAKKSLYLQMNSLRAEDTALYYCAKDIQYGNYYYGMDVWGQGTTVTVSSASTKGPSVFPLAPSSKSTSGGTAALGCLVKDYFPEPVTVSWNSGALTSGVHTFPAVLQSSGLYSLSSVVTVPSSSLGTQTYICNVNHKPSNTKVDKKVEPKSCDKTHTCPPCPAPELLGGPSVFLFPPKPKDTLMISRTPEVTCVVVDVSHEDPEVKFNWYVDGVEVHNAKTKPREEQYNSTYRVVSVLTVLHQDWLNGKEYKCKVSNKALPAPIEKTISKAKGQPREPQVYTLPPSRDELTKNQVSLTCLVKGFYPSDIAVEWESNGQPENNYKTTPPVLDSDGSFFLYSKLTVDKSRWQQGNVFSCSVMHEALHNHYTQKSLSLSPG

SEQ ID NO: 4835 - protein, 451 aa, synthetic construct
  REGION 1..451: note = Oc4041_VH-CH
EVQLVESGGGLVQPGGSLRLSCAASGYTFTSYNMHWVRQAPGKGLEWVGAIYPGNGDTSYNQKFKGRFTISVDKSKNTLYLQMNSLRAEDTAVYYCARVVYYSNSYWYFDVWGQGTLVTVSSASTKGPSVFPLAPSSKSTSGGTAALGCLVKDYFPEPVTVSWNSGALTSGVHTFPAVLQSSGLYSLSSVVTVPSSSLGTQTYICNVNHKPSNTKVDKKVEPKSCDKTHTCPPCPAPELLGGPSVFLFPPKPKDTLMISRTPEVTCVVVDVSHEDPEVKFNWYVDGVEVHNAKTKPREEQYNATYRVVSVLTVLHQDWLNGKEYKCKVSNKALPAPIAATISKAKGQPREPQVYTLPPSREEMTKNQVSLTCLVKGFYPSDIAVEWESNGQPENNYKTTPPVLDSDGSFFLYSKLTVDKSRWQQGNVFSCSVMHEALHNHYTQKSLSLSPG

SEQ ID NO: 4836 - protein, 448 aa, synthetic construct
  REGION 1..448: note = MoH1_VH-CH/N84G/hole
EVQLVQSGAEVKKPGASVKVSCKASGYTFTNYYIHWVRQAPGQGLEWIGWIYPGDGNTKYNEKFKGRATLTADTSTSTAYLELSSLRSEDTAVYYCARDSYSNYYFDYWGQGTLVTVSSASTKGPSVFPLAPSSKSTSGGTAALGCLVKDYFPEPVTVSWNSGALTSGVHTFPAVLQSSGLYSLSSVVTVPSSSLGTQTYICNVNHKPSNTKVDKKVEPKSCDKTHTCPPCPAPELLGGPSVFLFPPKPKDTLMISRTPEVTCVVVDVSHEDPEVKFNWYVDGVEVHNAKTKPREEQYGSTYRVVSVLTVLHQDWLNGKEYKCKVSNKALPAPIEKTISKAKGQPREPQVYTLPPSREEMTKNQVSLSCAVKGFYPSDIAVEWESNGQPENNYKTTPPVLDSDGSFFLVSKLTVDKSRWQQGNVFSCSVMHEALHNHYTQKSLSLSPG

SEQ ID NO: 4837 - protein, 451 aa, synthetic construct
  REGION 1..451: note = MoH2_VH-CH/N84G/knob
EVQLVESGGGLVQPGGSLRLSCAASGYTFTSYNMHWVRQAPGKGLEWVGAIYPGNGDTSYNQKFKGRFTISVDKSKNTLYLQMNSLRAEDTAVYYCARVVYYSNSYWYFDVWGQGTLVTVSSASTKGPSVFPLAPSSKSTSGGTAALGCLVKDYFPEPVTVSWNSGALTSGVHTFPAVLQSSGLYSLSSVVTVPSSSLGTQTYICNVNHKPSNTKVDKKVEPKSCDKTHTCPPCPAPELLGGPSVFLFPPKPKDTLMISRTPEVTCVVVDVSHEDPEVKFNWYVDGVEVHNAKTKPREEQYGSTYRVVSVLTVLHQDWLNGKEYKCKVSNKALPAPIEKTISKAKGQPREPQVYTLPPSREEMTKNQVSLWCLVKGFYPSDIAVEWESNGQPENNYKTTPPVLDSDGSFFLYSKLTVDKSRWQQGNVFSCSVMHEALHNHYTQKSLSLSPG

SEQ ID NO: 4838 - protein, 466 aa, synthetic construct
  REGION 1..466: note = TNFR1B_Fc
LPAQVAFTPYAPEPGSTCRLREYYDQTAQMCCSKCSPGQHAKVFCTKTSDTVCDSCEDSTYTQLWNWVPECLSCGSRCSSDQVETQACTREQNRICTCRPGWYCALSKQEGCRLCAPLRKCRPGFGVARPGTETSDVVCKPCAPGTFSNTTSSTDICRPHQICNVVAIPGNASMDAVCTSTSPTRSMAPGAVHLPQPVSTRSQHTQPTPEPSTAPSTSFLLPMGPSPPAEGSTGDEPKSCDKTHTCPPCPAPELLGGPSVFLFPPKPKDTLMISRTPEVTCVVVDVSHEDPEVKFNWYVDGVEVHNAKTKPREEQYNSTYRVVSVLTVLHQDWLNGKEYKCKVSNKALPAPIEKTISKAKGQPREPQVYTLPPSREEMTKNQVSLTCLVKGFYPSDIAVEWESNGQPENNYKTTPPVLDSDGSFFLYSKLTVDKSRWQQGNVFSCSVMHEALHNHYTQKSLSLSPG

SEQ ID NO: 4839 - protein, 450 aa, synthetic construct
  REGION 1..450: note = Ad_VH-CH
EVQLVESGGGLVQPGRSLRLSCAASGFTFDDYAMHWVRQAPGKGLEWVSAITWNSGHIDYADSVEGRFTISRDNAKNSLYLQMNSLRAEDTAVYYCAKVSYLSTASSLDYWGQGTLVTVSSASTKGPSVFPLAPSSKSTSGGTAALGCLVKDYFPEPVTVSWNSGALTSGVHTFPAVLQSSGLYSLSSVVTVPSSSLGTQTYICNVNHKPSNTKVDKKVEPKSCDKTHTCPPCPAPELLGGPSVFLFPPKPKDTLMISRTPEVTCVVVDVSHEDPEVKFNWYVDGVEVHNAKTKPREEQYNSTYRVVSVLTVLHQDWLNGKEYKCKVSNKALPAPIEKTISKAKGQPREPQVYTLPPSRDELTKNQVSLTCLVKGFYPSDIAVEWESNGQPENNYKTTPPVLDSDGSFFLYSKLTVDKSRWQQGNVFSCSVMHEALHNHYTQKSLSLSPG

SEQ ID NO: 4840 - protein, 450 aa, synthetic construct
  REGION 1..450: note = Ve_VH-CH
QVQLVQSGAEVKKPGASVKVSCKGSGYTFTSYWMHWVRQAPGQRLEWIGEIDPSESNTNYNQKFKGRVTLTVDISASTAYMELSSLRSEDTAVYYCARGGYDGWDYAIDYWGQGTLVTVSSASTKGPSVFPLAPSSKSTSGGTAALGCLVKDYFPEPVTVSWNSGALTSGVHTFPAVLQSSGLYSLSSVVTVPSSSLGTQTYICNVNHKPSNTKVDKKVEPKSCDKTHTCPPCPAPELAGAPSVFLFPPKPKDTLMISRTPEVTCVVVDVSHEDPEVKFNWYVDGVEVHNAKTKPREEQYNSTYRVVSVLTVLHQDWLNGKEYKCKVSNKALPAPIEKTISKAKGQPREPQVYTLPPSRDELTKNQVSLTCLVKGFYPSDIAVEWESNGQPENNYKTTPPVLDSDGSFFLYSKLTVDKSRWQQGNVFSCSVMHEALHNHYTQKSLSLSPG

SEQ ID NO: 4841 - protein, 448 aa, synthetic construct
  REGION 1..448: note = Us_VH-CH
EVQLVQSGAEVKKPGESLKISCKGSGYSFTTYWLGWVRQMPGKGLDWIGIMSPVDSDIRYSPSFQGQVTMSVDKSITTAYLQWNSLKASDTAMYYCARRRPGQGYFDFWGQGTLVTVSSSSTKGPSVFPLAPSSKSTSGGTAALGCLVKDYFPEPVTVSWNSGALTSGVHTFPAVLQSSGLYSLSSVVTVPSSSLGTQTYICNVNHKPSNTKVDKRVEPKSCDKTHTCPPCPAPELLGGPSVFLFPPKPKDTLMISRTPEVTCVVVDVSHEDPEVKFNWYVDGVEVHNAKTKPREEQYNSTYRVVSVLTVLHQDWLNGKEYKCKVSNKALPAPIEKTISKAKGQPREPQVYTLPPSRDELTKNQVSLTCLVKGFYPSDIAVEWESNGQPENNYKTTPPVLDSDGSFFLYSKLTVDKSRWQQGNVFSCSVMHEALHNHYTQKSLSLSPG

SEQ ID NO: 4842 - protein, 456 aa, synthetic construct
  REGION 1..456: note = Se_VH-CH
EVQLVESGGGLVQPGGSLRLSCAASGFTFSNYWMNWVRQAPGKGLEWVAAINQDGSEKYYVGSVKGRFTISRDNAKNSLYLQMNSLRVEDTAVYYCVRDYYDILTDYYIHYWYFDLWGRGTLVTVSSASTKGPSVFPLAPSSKSTSGGTAALGCLVKDYFPEPVTVSWNSGALTSGVHTFPAVLQSSGLYSLSSVVTVPSSSLGTQTYICNVNHKPSNTKVDKRVEPKSCDKTHTCPPCPAPELLGGPSVFLFPPKPKDTLMISRTPEVTCVVVDVSHEDPEVKFNWYVDGVEVHNAKTKPREEQYNSTYRVVSVLTVLHQDWLNGKEYKCKVSNKALPAPIEKTISKAKGQPREPQVYTLPPSREEMTKNQVSLTCLVKGFYPSDIAVEWESNGQPENNYKTTPPVLDSDGSFFLYSKLTVDKSRWQQGNVFSCSVMHEALHNHYTQKSLSLSPG

SEQ ID NO: 4843 - protein, 446 aa, synthetic construct
  REGION 1..446: note = Pe_VH-CH
QVQLVQSGVEVKKPGASVKVSCKASGYTFTNYYMYWVRQAPGQGLEWMGGINPSNGGTNFNEKFKNRVTLTTDSSTTTAYMELKSLQFDDTAVYYCARRDYRFDMGFDYWGQGTTVTVSSASTKGPSVFPLAPCSRSTSESTAALGCLVKDYFPEPVTVSWNSGALTSGVHTFPAVLQSSGLYSLSSVVTVPSSSLGTKTYTCNVDHKPSNTKVDKRVESKYGPPCPPCPAPEFLGGPSVFLFPPKPKDTLMISRTPEVTCVVVDVSQEDPEVQFNWYVDGVEVHNAKTKPREEQFNSTYRVVSVLTVLHQDWLNGKEYKCKVSNKGLPSSIEKTISKAKGQPREPQVYTLPPSQEEMTKNQVSLTCLVKGFYPSDIAVEWESNGQPENNYKTTPPVLDSDGSFFLYSRLTVDKSRWQEGNVFSCSVMHEALHNHYTQKSLSLSLG

SEQ ID NO: 4844 - protein, 447 aa, synthetic construct
  REGION 1..447: note = Ip_VH-CH
QVQLVESGGGVVQPGRSLRLSCAASGFTFSSYTMHWVRQAPGKGLEWVTFISYDGNNKYYADSVKGRFTISRDNSKNTLYLQMNSLRAEDTAIYYCARTGWLGPFDYWGQGTLVTVSSASTKGPSVFPLAPSSKSTSGGTAALGCLVKDYFPEPVTVSWNSGALTSGVHTFPAVLQSSGLYSLSSVVTVPSSSLGTQTYICNVNHKPSNTKVDKRVEPKSCDKTHTCPPCPAPELLGGPSVFLFPPKPKDTLMISRTPEVTCVVVDVSHEDPEVKFNWYVDGVEVHNAKTKPREEQYNSTYRVVSVLTVLHQDWLNGKEYKCKVSNKALPAPIEKTISKAKGQPREPQVYTLPPSRDELTKNQVSLTCLVKGFYPSDIAVEWESNGQPENNYKTTPPVLDSDGSFFLYSKLTVDKSRWQQGNVFSCSVMHEALHNHYTQKSLSLSPG

SEQ ID NO: 4845 - protein, 446 aa, synthetic construct
  REGION 1..446: note = 388D4-3_VH-CH
EVQLVQSGAEVKKPGASVKVSCKASGYTFTDYEMHWVRQAPGQGLEWMGIIDPGTGGTAYNQKFQGRVTMTADKSTSTVYMELSSLRSEDTAVYYCTSEKFGSNYYFDYWGQGTLVTVSSASTKGPSVFPLAPCSRSTSESTAALGCLVKDYFPEPVTVSWNSGALTSGVHTFPAVLQSSGLYSLSSVVTVPSSSLGTKTYTCNVDHKPSNTKVDKRVESKYGPPCPPCPAPEFLGGPSVFLFPPKPKDTLMISRTPEVTCVVVDVSQEDPEVQFNWYVDGVEVHNAKTKPREEQFNSTYRVVSVLTVLHQDWLNGKEYKCKVSNKGLPSSIEKTISKAKGQPREPQVYTLPPSQEEMTKNQVSLTCLVKGFYPSDIAVEWESNGQPENNYKTTPPVLDSDGSFFLYSRLTVDKSRWQEGNVFSCSVMHEALHNHYTQKSLSLSLG

SEQ ID NO: 4846 - protein, 446 aa, synthetic construct
  REGION 1..446: note = 244C8-2_VH-CH
QVQLVQSGAEVKKPGASVKVSCKASGYTFTSYWMHWVRQAPGQGLEWMGMIDPSNSETSLNQKFQGRVTMTVDKSTNTVYMELSSLRSEDTAVYYCARSRGNYAYEMDYWGQGTLVTVSSASTKGPSVFPLAPCSRSTSESTAALGCLVKDYFPEPVTVSWNSGALTSGVHTFPAVLQSSGLYSLSSVVTVPSSSLGTKTYTCNVDHKPSNTKVDKRVESKYGPPCPPCPAPEFLGGPSVFLFPPKPKDTLMISRTPEVTCVVVDVSQEDPEVQFNWYVDGVEVHNAKTKPREEQFNSTYRVVSVLTVLHQDWLNGKEYKCKVSNKGLPSSIEKTISKAKGQPREPQVYTLPPSQEEMTKNQVSLTCLVKGFYPSDIAVEWESNGQPENNYKTTPPVLDSDGSFFLYSRLTVDKSRWQEGNVFSCSVMHEALHNHYTQKSLSLSLG

SEQ ID NO: 4847 - protein, 447 aa, synthetic construct
  REGION 1..447: note = At_VH-CH/N297A
EVQLVESGGGLVQPGGSLRLSCAASGFTFSDSWIHWVRQAPGKGLEWVAWISPYGGSTYYADSVKGRFTISADTSKNTAYLQMNSLRAEDTAVYYCARRHWPGGFDYWGQGTLVTVSSASTKGPSVFPLAPSSKSTSGGTAALGCLVKDYFPEPVTVSWNSGALTSGVHTFPAVLQSSGLYSLSSVVTVPSSSLGTQTYICNVNHKPSNTKVDKKVEPKSCDKTHTCPPCPAPELLGGPSVFLFPPKPKDTLMISRTPEVTCVVVDVSHEDPEVKFNWYVDGVEVHNAKTKPREEQYASTYRVVSVLTVLHQDWLNGKEYKCKVSNKALPAPIEKTISKAKGQPREPQVYTLPPSREEMTKNQVSLTCLVKGFYPSDIAVEWESNGQPENNYKTTPPVLDSDGSFFLYSKLTVDKSRWQQGNVFSCSVMHEALHNHYTQKSLSLSPG

SEQ ID NO: 4848 - protein, 449 aa, synthetic construct
  REGION 1..449: note = B60-55_VH-CH/FES
QVQLVQSGAEVKKPASSVKVSCTASGGSFSTYAISWVRQAPGQGLEWMGGIIPIFGTTKYAQRFQGRVTITADESTTTAYMELSSLISDDTALYYCTTSRGFNYGWFDYWGQGTLVTVSSASTKGPSVFPLAPSSKSTSGGTAALGCLVKDYFPEPVTVSWNSGALTSGVHTFPAVLQSSGLYSLSSVVTVPSSSLGTQTYICNVNHKPSNTKVDKKVEPKSCDKTHTCPPCPAPELLGGPSVFLFPPKPKDTLMISRTPEVTCVVVDVSHEDPEVKFNWYVDGVEVHNAKTKPREEQYNSTYRVVSVLTVLHQDWLNGKEYKCKVSNKALPAPIEKTISKAKGQPREPQVYTLPPSRDELTKNQVSLTCLVKGFYPSDIAVEWESNGQPENNYKTTPPVLDSDGSFFLYSKLTVDKSRWQQGNVFSCSVMHEALHNHYTQKSLSLSPG

SEQ ID NO: 4849 - protein, 218 aa, synthetic construct
  REGION 1..218: note = ADG-20_VL-CL
QSVLTQPPSVSGAPGQRITISCTGSSSNIGAGYDVHWYQQLPGTAPKLLIYGSSSRNSGVPDRFSGSKSGTSASLAITGLQAEDEADYYCQSYDSSLSVLYTFGTGTKVTVLGQPKAAPSVTLFPPSSEELQANKATLVCLISDFYPGAVTVAWKADSSPVKAGVETTTPSKQSNNKYAASSYLSLTPEQWKSHRSYSCQVTHEGSTVEKTVAPTECS

SEQ ID NO: 4850 - protein, 219 aa, synthetic construct
  REGION 1..219: note = Ta_VK-Ck
DIVMTQSPATLSLSPGERATLSCRSSKSLQNVNGNTYLYWFQQKPGQSPQLLIYRMSNLNSGVPDRFSGSGSGTEFTLTISSLEPEDFAVYYCMQHLEYPITFGAGTKLEIKRTVAAPSVFIFPPSDEQLKSGTASVVCLLNNFYPREAKVQWKVDNALQSGNSQESVTEQDSKDSTYSLSSTLTLSKADYEKHKVYACEVTHQGLSSPVTKSFNRGEC

SEQ ID NO: 4851 - protein, 214 aa, synthetic construct
  REGION 1..214: note = M971_VK-Ck
DIQMTQSPSSLSASVGDRVTITCRASQTIWSYLNWYQQRPGKAPNLLIYAASSLQSGVPSRFSGRGSGTDFTLTISSLQAEDFATYYCQQSYSIPQTFGQGTKLEIKRTVAAPSVFIFPPSDEQLKSGTASVVCLLNNFYPREAKVQWKVDNALQSGNSQESVTEQDSKDSTYSLSSTLTLSKADYEKHKVYACEVTHQGLSSPVTKSFNRGEC

SEQ ID NO: 4852 - protein, 214 aa, synthetic construct
  REGION 1..214: note = Of_VK-CK
EIVLTQSPATLSLSPGERATLSCRASQSVSSYLAWYQQKPGQAPRLLIYDASNRATGIPARFSGSGSGTDFTLTISSLEPEDFAVYYCQQRSNWPITFGQGTRLEIKRTVAAPSVFIFPPSDEQLKSGTASVVCLLNNFYPREAKVQWKVDNALQSGNSQESVTEQDSKDSTYSLSSTLTLSKADYEKHKVYACEVTHQGLSSPVTKSFNRGEC

SEQ ID NO: 4853 - protein, 213 aa, synthetic construct
  REGION 1..213: note = Oc4041_VK-CK
DIQMTQSPSSLSASVGDRVTITCRASSSVSYMHWYQQKPGKAPKPLIYAPSNLASGVPSRFSGSGSGTDFTLTISSLQPEDFATYYCQQWSFNPPTFGQGTKVEIKRTVAAPSVFIFPPSDEQLKSGTASVVCLLNNFYPREAKVQWKVDNALQSGNSQESVTEQDSKDSTYSLSSTLTLSKADYEKHKVYACEVTHQGLSSPVTKSFNRGEC

SEQ ID NO: 4854 - protein, 219 aa, synthetic construct
  REGION 1..219: note = MoL1_VK-CK
DIVMTQSPDSLAVSLGERATINCKSSQSLLNSRTRKNYLAWYQQKPGQPPKLLIYWASTRESGVPDRFSGSGSGTDFTLTISSLQAEDVAVYYCTQSFILRTFGQGTKVEIKRTVAAPSVFIFPPSDEQLKSGTASVVCLLNNFYPREAKVQWKVDNALQSGNSQESVTEQDSKDSTYSLSSTLTLSKADYEKHKVYACEVTHQGLSSPVTKSFNRGEC

SEQ ID NO: 4855 - protein, 213 aa, synthetic construct; identical to SEQ ID NO: 4853
  REGION 1..213: note = MoL2_VK-CK

SEQ ID NO: 4856 - protein, 214 aa, synthetic construct; identical to SEQ ID NO: 238
  REGION 1..214: note = Ad_VK-CK

SEQ ID NO: 4857 - protein, 219 aa, synthetic construct
  REGION 1..219: note = Ve_VK-CK
DVVMTQSPLSLPVTPGEPASISCRSSQSLAKSYGNTYLSWYLQKPGQSPQLLIYGISNRFSGVPDRFSGSGSGTDFTLKISRVEAEDVGVYYCLQGTHQPYTFGQGTKVEIKRTVAAPSVFIFPPSDEQLKSGTASVVCLLNNFYPREAKVQWKVDNALQSGNSQESVTEQDSKDSTYSLSSTLTLSKADYEKHKVYACEVTHQGLSSPVTKSFNRGEC

SEQ ID NO: 4858 - protein, 214 aa, synthetic construct
  REGION 1..214: note = Us_VK-CK
DIQMTQSPSSLSASVGDRVTITCRASQGISSWLAWYQQKPEKAPKSLIYAASSLQSGVPSRFSGSGSGTDFTLTISSLQPEDFATYYCQQYNIYPYTFGQGTKLEIKRTVAAPSVFIFPPSDEQLKSGTASVVCLLNNFYPREAKVQWKVDNALQSGNSQESVTEQDSKDSTYSLSSTLTLSKADYEKHKVYACEVTHQGLSSPVTKSFNRGEC

SEQ ID NO: 4859 - protein, 215 aa, synthetic construct
  REGION 1..215: note = Se_VK-CK
EIVLTQSPGTLSLSPGERATLSCRASQSVSSSYLAWYQQKPGQAPRLLIYGASSRATGIPDRFSGSGSGTDFTLTISRLEPEDFAVYYCQQYGSSPCTFGQGTRLEIKRTVAAPSVFIFPPSDEQLKSGTASVVCLLNNFYPREAKVQWKVDNALQSGNSQESVTEQDSKDSTYSLSSTLTLSKADYEKHKVYACEVTHQGLSSPVTKSFNRGEC

SEQ ID NO: 4860 - protein, 218 aa, synthetic construct
  REGION 1..218: note = Pe_VK-CK
EIVLTQSPATLSLSPGERATLSCRASKGVSTSGYSYLHWYQQKPGQAPRLLIYLASYLESGVPARFSGSGSGTDFTLTISSLEPEDFAVYYCQHSRDLPLTFGGGTKVEIKRTVAAPSVFIFPPSDEQLKSGTASVVCLLNNFYPREAKVQWKVDNALQSGNSQESVTEQDSKDSTYSLSSTLTLSKADYEKHKVYACEVTHQGLSSPVTKSFNRGEC

SEQ ID NO: 4861 - protein, 215 aa, synthetic construct
  REGION 1..215: note = Ip_VK-CK
EIVLTQSPGTLSLSPGERATLSCRASQSVGSSYLAWYQQKPGQAPRLLIYGAFSRATGIPDRFSGSGSGTDFTLTISRLEPEDFAVYYCQQYGSSPWTFGQGTKVEIKRTVAAPSVFIFPPSDEQLKSGTASVVCLLNNFYPREAKVQWKVDNALQSGNSQESVTEQDSKDSTYSLSSTLTLSKADYEKHKVYACEVTHQGLSSPVTKSFNRGEC

SEQ ID NO: 4862 - protein, 219 aa, synthetic construct
  REGION 1..219: note = 388D4-3_VK-CK
DIVMTQTPLSSPVTLGQPASISCRSSQTIVHSDGNTYLEWYQQRPGQPPRLLIYKVSNRFSGVPDRFSGSGAGTDFTLKISRVEAEDVGVYYCFQGSHVPLTFGQGTKLEIKRTVAAPSVFIFPPSDEQLKSGTASVVCLLNNFYPREAKVQWKVDNALQSGNSQESVTEQDSKDSTYSLSSTLTLSKADYEKHKVYACEVTHQGLSSPVTKSFNRGEC

SEQ ID NO: 4863 - protein, 215 aa, synthetic construct
  REGION 1..215: note = 244C8-2_VK-CK
DIVLTQSPGTLSLSPGEKVTLSCRASSSVSSNYLYWYQQKPGQAPRLVIYSTSNLATGIPDRFSGSGSGTDYTLTISRLEPEDFAVYFCHQWSSYPPTFGQGTKVEIKRTVAAPSVFIFPPSDEQLKSGTASVVCLLNNFYPREAKVQWKVDNALQSGNSQESVTEQDSKDSTYSLSSTLTLSKADYEKHKVYACEVTHQGLSSPVTKSFNRGEC

SEQ ID NO: 4864 - protein, 214 aa, synthetic construct
  REGION 1..214: note = At_VK-CK
DIQMTQSPSSLSASVGDRVTITCRASQDVSTAVAWYQQKPGKAPKLLIYSASFLYSGVPSRFSGSGSGTDFTLTISSLQPEDFATYYCQQYLYHPATFGQGTKVEIKRTVAAPSVFIFPPSDEQLKSGTASVVCLLNNFYPREAKVQWKVDNALQSGNSQESVTEQDSKDSTYSLSSTLTLSKADYEKHKVYACEVTHQGLSSPVTKSFNRGEC

SEQ ID NO: 4865 - protein, 214 aa, synthetic construct
  REGION 1..214: note = B60-55_VK-CK
EIVMTQSPATLSLSPGERATLSCRASQSVGIHLAWYQQKLGQAPRLLIYGASSRATGIPDRFSGSGSGTDFTLTISRLEPEDFAVYYCQQYGSLPRTFGQGTKVEIKRTVAAPSVFIFPPSDEQLKSGTASVVCLLNNFYPREAKVQWKVDNALQSGNSQESVTEQDSKDSTYSLSSTLTLSKADYEKHKVYACEVTHQGLSSPVTKSFNRGEC

SEQ ID NO: 4866 - protein, 606 aa, synthetic construct
  REGION 1..606: note = Ad_VH-CH1/N84S/Q39K/S183E/CLD201/hole/RF
EVQLVESGGGLVQPGRSLRLSCAASGFTFDDYAMHWVRKAPGKGLEWVSAITWNSGHIDYADSVEGRFTISRDNAKNSLYLQMSSLRAEDTAVYYCAKVSYLSTASSLDYWGQGTLVTVSSASTKGPSVFPLAPSSKSTSGGTAALGCLVKDYFPEPVTVSWNSGALTSGVHTFPAVLQSSGLYSLESVVTVPSSSLGTQTYICNVNHKPSNTKVDKKVEPKSCTDWSPYADQSIKVRISLKSALGDKAYEWNDNEMYLFRSSVAYAMRQYFLKVKNQMILFGEEDVRVANLKPRISFNFFVTAPKNVSDIIPRTEVEKAIRMSRSRINDAFRLNDNSLEFLGIQPTLGPPNQPPVSTSTSPTRSMAPGAVHLPQPVSTRDKTHTCPPCPAPELLGGPSVFLFPPKPKDTLMISRTPEVTCVVVDVSHEDPEVKFNWYVDGVEVHNAKTKPREEQYNSTYRVVSVLTVLHQDWLNGKEYKCKVSNKALPAPIEKTISKAKGQPREPQVCTLPPSRDELTKNQVSLSCAVKGFYPSDIAVEWESNGQPENNYKTTPPVLDSDGSFFLVSKLTVDKSRWQQGNVFSCSVMHEALHNRFTQKSLSLSPG

SEQ ID NO: 4867 - protein, 438 aa, synthetic construct
  REGION 1..438: note = Us_VK-x-CH1/Q38E/S183K/knob
DIQMTQSPSSLSASVGDRVTITCRASQGISSWLAWYQKKPEKAPKSLIYAASSLQSGVPSRFSGSGSGTDFTLTISSLQPEDFATYYCQQYNIYPYTFGQGTKVEIKSSASTKGPSVFPLAPSSKSTSGGTAALGCLVKDYFPEPVTVSWNSGALTSGVHTFPAVLQSSGLYSLKSVVTVPSSSLGTQTYICNVNHKPSNTKVDKKVEPKSCDKTHTCPPCPAPELLGGPSVFLFPPKPKDTLMISRTPEVTCVVVDVSHEDPEVKFNWYVDGVEVHNAKTKPREEQYNSTYRVVSVLTVLHQDWLNGKEYKCKVSNKALPAPIEKTISKAKGQPREPQVYTLPPCRDELTKNQVSLWCLVKGFYPSDIAVEWESNGQPENNYKTTPPVLDSDGSFFLYSKLTVDKSRWQQGNVFSCSVMHEALHNHYTQKSLSLSPG

SEQ ID NO: 4868 - protein, 438 aa, synthetic construct
  REGION 1..438: note = Us_VK-x-CH1/Q38K/S183K/knob
DIQMTQSPSSLSASVGDRVTITCRASQGISSWLAWYQEKPEKAPKSLIYAASSLQSGVPSRFSGSGSGTDFTLTISSLQPEDFATYYCQQYNIYPYTFGQGTKVEIKSSASTKGPSVFPLAPSSKSTSGGTAALGCLVKDYFPEPVTVSWNSGALTSGVHTFPAVLQSSGLYSLKSVVTVPSSSLGTQTYICNVNHKPSNTKVDKKVEPKSCDKTHTCPPCPAPELLGGPSVFLFPPKPKDTLMISRTPEVTCVVVDVSHEDPEVKFNWYVDGVEVHNAKTKPREEQYNSTYRVVSVLTVLHQDWLNGKEYKCKVSNKALPAPIEKTISKAKGQPREPQVYTLPPCRDELTKNQVSLWCLVKGFYPSDIAVEWESNGQPENNYKTTPPVLDSDGSFFLYSKLTVDKSRWQQGNVFSCSVMHEALHNHYTQKSLSLSPG

SEQ ID NO: 4869 - protein, 606 aa, synthetic construct
  REGION 1..606: note = Ad_VH-CH1/N84S/Q39E/S183E/CLD201/hole/RF
EVQLVESGGGLVQPGRSLRLSCAASGFTFDDYAMHWVREAPGKGLEWVSAITWNSGHIDYADSVEGRFTISRDNAKNSLYLQMSSLRAEDTAVYYCAKVSYLSTASSLDYWGQGTLVTVSSASTKGPSVFPLAPSSKSTSGGTAALGCLVKDYFPEPVTVSWNSGALTSGVHTFPAVLQSSGLYSLESVVTVPSSSLGTQTYICNVNHKPSNTKVDKKVEPKSCTDWSPYADQSIKVRISLKSALGDKAYEWNDNEMYLFRSSVAYAMRQYFLKVKNQMILFGEEDVRVANLKPRISFNFFVTAPKNVSDIIPRTEVEKAIRMSRSRINDAFRLNDNSLEFLGIQPTLGPPNQPPVSTSTSPTRSMAPGAVHLPQPVSTRDKTHTCPPCPAPELLGGPSVFLFPPKPKDTLMISRTPEVTCVVVDVSHEDPEVKFNWYVDGVEVHNAKTKPREEQYNSTYRVVSVLTVLHQDWLNGKEYKCKVSNKALPAPIEKTISKAKGQPREPQVCTLPPSRDELTKNQVSLSCAVKGFYPSDIAVEWESNGQPENNYKTTPPVLDSDGSFFLVSKLTVDKSRWQQGNVFSCSVMHEALHNRFTQKSLSLSPG

SEQ ID NO: 4870 - protein, 604 aa, synthetic construct
  REGION 1..604: note = Us_VH-CH1/N84S/Q39K/S183E/CLD201/hole/RF
EVQLVQSGAEVKKPGESLKISCKGSGYSFTTYWLGWVRKMPGKGLDWIGIMSPVDSDIRYSPSFQGQVTMSVDKSITTAYLQWSSLKASDTAMYYCARRRPGQGYFDFWGQGTLVTVSSASTKGPSVFPLAPSSKSTSGGTAALGCLVKDYFPEPVTVSWNSGALTSGVHTFPAVLQSSGLYSLESVVTVPSSSLGTQTYICNVNHKPSNTKVDKKVEPKSCTDWSPYADQSIKVRISLKSALGDKAYEWNDNEMYLFRSSVAYAMRQYFLKVKNQMILFGEEDVRVANLKPRISFNFFVTAPKNVSDIIPRTEVEKAIRMSRSRINDAFRLNDNSLEFLGIQPTLGPPNQPPVSTSTSPTRSMAPGAVHLPQPVSTRDKTHTCPPCPAPELLGGPSVFLFPPKPKDTLMISRTPEVTCVVVDVSHEDPEVKFNWYVDGVEVHNAKTKPREEQYNSTYRVVSVLTVLHQDWLNGKEYKCKVSNKALPAPIEKTISKAKGQPREPQVCTLPPSRDELTKNQVSLSCAVKGFYPSDIAVEWESNGQPENNYKTTPPVLDSDGSFFLVSKLTVDKSRWQQGNVFSCSVMHEALHNRFTQKSLSLSPG

SEQ ID NO: 4871 - protein, 438 aa, synthetic construct
  REGION 1..438: note = Ad_VK-x-CH1/Q38E/S183K/knob
DIQMTQSPSSLSASVGDRVTITCRASQGIRNYLAWYQEKPGKAPKLLIYAASTLQSGVPSRFSGSGSGTDFTLTISSLQPEDVATYYCQRYNRAPYTFGQGTKVEIKSSASTKGPSVFPLAPSSKSTSGGTAALGCLVKDYFPEPVTVSWNSGALTSGVHTFPAVLQSSGLYSLKSVVTVPSSSLGTQTYICNVNHKPSNTKVDKKVEPKSCDKTHTCPPCPAPELLGGPSVFLFPPKPKDTLMISRTPEVTCVVVDVSHEDPEVKFNWYVDGVEVHNAKTKPREEQYNSTYRVVSVLTVLHQDWLNGKEYKCKVSNKALPAPIEKTISKAKGQPREPQVYTLPPCRDELTKNQVSLWCLVKGFYPSDIAVEWESNGQPENNYKTTPPVLDSDGSFFLYSKLTVDKSRWQQGNVFSCSVMHEALHNHYTQKSLSLSPG

SEQ ID NO: 4872 - protein, 438 aa, synthetic construct
  REGION 1..438: note = Ad_VK-x-CH1/Q38K/S183K/knob
DIQMTQSPSSLSASVGDRVTITCRASQGIRNYLAWYQKKPGKAPKLLIYAASTLQSGVPSRFSGSGSGTDFTLTISSLQPEDVATYYCQRYNRAPYTFGQGTKVEIKSSASTKGPSVFPLAPSSKSTSGGTAALGCLVKDYFPEPVTVSWNSGALTSGVHTFPAVLQSSGLYSLKSVVTVPSSSLGTQTYICNVNHKPSNTKVDKKVEPKSCDKTHTCPPCPAPELLGGPSVFLFPPKPKDTLMISRTPEVTCVVVDVSHEDPEVKFNWYVDGVEVHNAKTKPREEQYNSTYRVVSVLTVLHQDWLNGKEYKCKVSNKALPAPIEKTISKAKGQPREPQVYTLPPCRDELTKNQVSLWCLVKGFYPSDIAVEWESNGQPENNYKTTPPVLDSDGSFFLYSKLTVDKSRWQQGNVFSCSVMHEALHNHYTQKSLSLSPG

SEQ ID NO: 4873 - protein, 604 aa, synthetic construct
  REGION 1..604: note = Us_VH-CH1/N84S/Q39E/S183E/CLD201/hole/RF
EVQLVQSGAEVKKPGESLKISCKGSGYSFTTYWLGWVREMPGKGLDWIGIMSPVDSDIRYSPSFQGQVTMSVDKSITTAYLQWSSLKASDTAMYYCARRRPGQGYFDFWGQGTLVTVSSASTKGPSVFPLAPSSKSTSGGTAALGCLVKDYFPEPVTVSWNSGALTSGVHTFPAVLQSSGLYSLESVVTVPSSSLGTQTYICNVNHKPSNTKVDKKVEPKSCTDWSPYADQSIKVRISLKSALGDKAYEWNDNEMYLFRSSVAYAMRQYFLKVKNQMILFGEEDVRVANLKPRISFNFFVTAPKNVSDIIPRTEVEKAIRMSRSRINDAFRLNDNSLEFLGIQPTLGPPNQPPVSTSTSPTRSMAPGAVHLPQPVSTRDKTHTCPPCPAPELLGGPSVFLFPPKPKDTLMISRTPEVTCVVVDVSHEDPEVKFNWYVDGVEVHNAKTKPREEQYNSTYRVVSVLTVLHQDWLNGKEYKCKVSNKALPAPIEKTISKAKGQPREPQVCTLPPSRDELTKNQVSLSCAVKGFYPSDIAVEWESNGQPENNYKTTPPVLDSDGSFFLVSKLTVDKSRWQQGNVFSCSVMHEALHNRFTQKSLSLSPG

SEQ ID NO: 4874 - protein, 439 aa, synthetic construct
  REGION 1..439: note = Se_VK-x-CH1/Q38E/S183K/knob
EIVLTQSPGTLSLSPGERATLSCRASQSVSSSYLAWYQEKPGQAPRLLIYGASSRATGIPDRFSGSGSGTDFTLTISRLEPEDFAVYYCQQYGSSPCTFGQGTKVEIKSSASTKGPSVFPLAPSSKSTSGGTAALGCLVKDYFPEPVTVSWNSGALTSGVHTFPAVLQSSGLYSLKSVVTVPSSSLGTQTYICNVNHKPSNTKVDKKVEPKSCDKTHTCPPCPAPELLGGPSVFLFPPKPKDTLMISRTPEVTCVVVDVSHEDPEVKFNWYVDGVEVHNAKTKPREEQYNSTYRVVSVLTVLHQDWLNGKEYKCKVSNKALPAPIEKTISKAKGQPREPQVYTLPPCRDELTKNQVSLWCLVKGFYPSDIAVEWESNGQPENNYKTTPPVLDSDGSFFLYSKLTVDKSRWQQGNVFSCSVMHEALHNHYTQKSLSLSPG

SEQ ID NO: 4875 - protein, 439 aa, synthetic construct
  REGION 1..439: note = Se_VK-x-CH1/Q38K/S183K/knob
EIVLTQSPGTLSLSPGERATLSCRASQSVSSSYLAWYQKKPGQAPRLLIYGASSRATGIPDRFSGSGSGTDFTLTISRLEPEDFAVYYCQQYGSSPCTFGQGTKVEIKSSASTKGPSVFPLAPSSKSTSGGTAALGCLVKDYFPEPVTVSWNSGALTSGVHTFPAVLQSSGLYSLKSVVTVPSSSLGTQTYICNVNHKPSNTKVDKKVEPKSCDKTHTCPPCPAPELLGGPSVFLFPPKPKDTLMISRTPEVTCVVVDVSHEDPEVKFNWYVDGVEVHNAKTKPREEQYNSTYRVVSVLTVLHQDWLNGKEYKCKVSNKALPAPIEKTISKAKGQPREPQVYTLPPCRDELTKNQVSLWCLVKGFYPSDIAVEWESNGQPENNYKTTPPVLDSDGSFFLYSKLTVDKSRWQQGNVFSCSVMHEALHNHYTQKSLSLSPG

SEQ ID NO: 4876 - protein, 612 aa, synthetic construct
  REGION 1..612: note = Se_VH-CH1/N84S/Q39K/S183E/CLD201/hole/RF
EVQLVESGGGLVQPGGSLRLSCAASGFTFSNYWMNWVRKAPGKGLEWVAAINQDGSEKYYVGSVKGRFTISRDNAKNSLYLQMSSLRVEDTAVYYCVRDYYDILTDYYIHYWYFDLWGRGTLVTVSSASTKGPSVFPLAPSSKSTSGGTAALGCLVKDYFPEPVTVSWNSGALTSGVHTFPAVLQSSGLYSLESVVTVPSSSLGTQTYICNVNHKPSNTKVDKKVEPKSCTDWSPYADQSIKVRISLKSALGDKAYEWNDNEMYLFRSSVAYAMRQYFLKVKNQMILFGEEDVRVANLKPRISFNFFVTAPKNVSDIIPRTEVEKAIRMSRSRINDAFRLNDNSLEFLGIQPTLGPPNQPPVSTSTSPTRSMAPGAVHLPQPVSTRDKTHTCPPCPAPELLGGPSVFLFPPKPKDTLMISRTPEVTCVVVDVSHEDPEVKFNWYVDGVEVHNAKTKPREEQYNSTYRVVSVLTVLHQDWLNGKEYKCKVSNKALPAPIEKTISKAKGQPREPQVCTLPPSRDELTKNQVSLSCAVKGFYPSDIAVEWESNGQPENNYKTTPPVLDSDGSFFLVSKLTVDKSRWQQGNVFSCSVMHEALHNRFTQKSLSLSPG

SEQ ID NO: 4877 - protein, 612 aa, synthetic construct
  REGION 1..612: note = Se_VH-CH1/N84S/Q39E/S183E/CLD201/hole/RF
EVQLVESGGGLVQPGGSLRLSCAASGFTFSNYWMNWVREAPGKGLEWVAAINQDGSEKYYVGSVKGRFTISRDNAKNSLYLQMSSLRVEDTAVYYCVRDYYDILTDYYIHYWYFDLWGRGTLVTVSSASTKGPSVFPLAPSSKSTSGGTAALGCLVKDYFPEPVTVSWNSGALTSGVHTFPAVLQSSGLYSLESVVTVPSSSLGTQTYICNVNHKPSNTKVDKKVEPKSCTDWSPYADQSIKVRISLKSALGDKAYEWNDNEMYLFRSSVAYAMRQYFLKVKNQMILFGEEDVRVANLKPRISFNFFVTAPKNVSDIIPRTEVEKAIRMSRSRINDAFRLNDNSLEFLGIQPTLGPPNQPPVSTSTSPTRSMAPGAVHLPQPVSTRDKTHTCPPCPAPELLGGPSVFLFPPKPKDTLMISRTPEVTCVVVDVSHEDPEVKFNWYVDGVEVHNAKTKPREEQYNSTYRVVSVLTVLHQDWLNGKEYKCKVSNKALPAPIEKTISKAKGQPREPQVCTLPPSRDELTKNQVSLSCAVKGFYPSDIAVEWESNGQPENNYKTTPPVLDSDGSFFLVSKLTVDKSRWQQGNVFSCSVMHEALHNRFTQKSLSLSPG

SEQ ID NO: 4878 - protein, 606 aa, synthetic construct
  REGION 1..606: note = Ad_VH-CH1/N84S/Q39K/S183E/CLD201/hole/LALA/RF
EVQLVESGGGLVQPGRSLRLSCAASGFTFDDYAMHWVRKAPGKGLEWVSAITWNSGHIDYADSVEGRFTISRDNAKNSLYLQMSSLRAEDTAVYYCAKVSYLSTASSLDYWGQGTLVTVSSASTKGPSVFPLAPSSKSTSGGTAALGCLVKDYFPEPVTVSWNSGALTSGVHTFPAVLQSSGLYSLESVVTVPSSSLGTQTYICNVNHKPSNTKVDKKVEPKSCTDWSPYADQSIKVRISLKSALGDKAYEWNDNEMYLFRSSVAYAMRQYFLKVKNQMILFGEEDVRVANLKPRISFNFFVTAPKNVSDIIPRTEVEKAIRMSRSRINDAFRLNDNSLEFLGIQPTLGPPNQPPVSTSTSPTRSMAPGAVHLPQPVSTRDKTHTCPPCPAPEAAGGPSVFLFPPKPKDTLMISRTPEVTCVVVDVSHEDPEVKFNWYVDGVEVHNAKTKPREEQYNSTYRVVSVLTVLHQDWLNGKEYKCKVSNKALPAPIEKTISKAKGQPREPQVCTLPPSRDELTKNQVSLSCAVKGFYPSDIAVEWESNGQPENNYKTTPPVLDSDGSFFLVSKLTVDKSRWQQGNVFSCSVMHEALHNRFTQKSLSLSPG

SEQ ID NO: 4879 - protein, 443 aa, synthetic construct
  REGION 1..443: note = Ve_VK-x-CH1/Q38E/S183K/knob/LALA
DVVMTQSPLSLPVTPGEPASISCRSSQSLAKSYGNTYLSWYLEKPGQSPQLLIYGISNRFSGVPDRFSGSGSGTDFTLKISRVEAEDVGVYYCLQGTHQPYTFGQGTKVEIKSSASTKGPSVFPLAPSSKSTSGGTAALGCLVKDYFPEPVTVSWNSGALTSGVHTFPAVLQSSGLYSLKSVVTVPSSSLGTQTYICNVNHKPSNTKVDKKVEPKSCDKTHTCPPCPAPEAAGGPSVFLFPPKPKDTLMISRTPEVTCVVVDVSHEDPEVKFNWYVDGVEVHNAKTKPREEQYNSTYRVVSVLTVLHQDWLNGKEYKCKVSNKALPAPIEKTISKAKGQPREPQVYTLPPCRDELTKNQVSLWCLVKGFYPSDIAVEWESNGQPENNYKTTPPVLDSDGSFFLYSKLTVDKSRWQQGNVFSCSVMHEALHNHYTQKSLSLSPG

SEQ ID NO: 4880 - protein, 438 aa, synthetic construct
  REGION 1..438: note = Ve_VK-x-CH1/Q38K/S183K/knob/LALA
DVVMTQSPLSLPVTPGEPASISCRSSQSLAKSYGNTYLSWYLKKPGQSPQLLIYGISNRFSGVPDRFSGSGSGTDFTLKISRVEAEDVGVYYCLQGTHQPYTFGQGTKVEIKSSASTKGPSVFPLAPSSKSTSGGTAALGCLVKDYFPEPVTVSWNSGALTSGVHTFPAVLQSSGLYSLKSVVTVPSSSLGTQTYICNVNHKPSNTKVDKKVEPKSCDKTHTCPPCPAPEAAGGPSVFLFPPKPKDTLMISRTPEVTCVVVDVSHEDPEVKFNWYVDGVEVHNAKTKPREEQYNSTYRVVSVLTVLHQDWLNGKEYKCKVSNKALPAPIEKTGQPREPQVYTLPPCRDELTKNQVSLWCLVKGFYPSDIAVEWESNGQPENNYKTTPPVLDSDGSFFLYSKLTVDKSRWQQGNVFSCSVMHEALHNHYTQKSLSLSPG

SEQ ID NO: 4881 - protein, 601 aa, synthetic construct
  REGION 1..601: note = Ad_VH-CH1/N84S/Q39E/S183E/CLD201/hole/LALA/RF
EVQLVESGGGLVQPGRSLRLSCAASGFTFDDYAMHWVREAPGKGLEWVSAITWNSGHIDYADSVEGRFTISRDNAKNSLYLQMSSLRAEDTAVYYCAKVSYLSTASSLDYWGQGTLVTVSSASTKGPSVFPLAPSSKSTSGGTAALGCLVKDYFPEPVTVSWNSGALTSGVHTFPAVLQSSGLYSLESVVTVPSSSLGTQTYICNVNHKPSNTKVDKKVEPKSCTDWSPYADQSIKVRISLKSALGDKAYEWNDNEMYLFRSSVAYAMRQYFLKVKNQMILFGEEDVRVANLKPRISFNFFVTAPKNVSDIIPRTEVEKAIRMSRSRINDAFRLNDNSLEFLGIQPTLGPPNQPPVSTSTSPTRSMAPGAVHLPQPVSTRDKTHTCPPCPAPEAAGGPSVFLFPPKPKDTLMISRTPEVTCVVVDVSHEDPEVKFNWYVDGVEVHNAKTKPREEQYNSTYRVVSVLTVLHQDWLNGKEYKCKVSNKALPAPIEKTGQPREPQVCTLPPSRDELTKNQVSLSCAVKGFYPSDIAVEWESNGQPENNYKTTPPVLDSDGSFFLVSKLTVDKSRWQQGNVFSCSVMHEALHNRFTQKSLSLSPG

SEQ ID NO: 4882 - protein, 601 aa, synthetic construct
  REGION 1..601: note = Ve_VH-CH1/Q39K/S183E/CLD201/hole/LALA/RF
QVQLVQSGAEVKKPGASVKVSCKGSGYTFTSYWMHWVRKAPGQRLEWIGEIDPSESNTNYNQKFKGRVTLTVDISASTAYMELSSLRSEDTAVYYCARGGYDGWDYAIDYWGQGTLVTVSSASTKGPSVFPLAPSSKSTSGGTAALGCLVKDYFPEPVTVSWNSGALTSGVHTFPAVLQSSGLYSLESVVTVPSSSLGTQTYICNVNHKPSNTKVDKKVEPKSCTDWSPYADQSIKVRISLKSALGDKAYEWNDNEMYLFRSSVAYAMRQYFLKVKNQMILFGEEDVRVANLKPRISFNFFVTAPKNVSDIIPRTEVEKAIRMSRSRINDAFRLNDNSLEFLGIQPTLGPPNQPPVSTSTSPTRSMAPGAVHLPQPVSTRDKTHTCPPCPAPEAAGGPSVFLFPPKPKDTLMISRTPEVTCVVVDVSHEDPEVKFNWYVDGVEVHNAKTKPREEQYNSTYRVVSVLTVLHQDWLNGKEYKCKVSNKALPAPIEKTGQPREPQVCTLPPSRDELTKNQVSLSCAVKGFYPSDIAVEWESNGQPENNYKTTPPVLDSDGSFFLVSKLTVDKSRWQQGNVFSCSVMHEALHNRFTQKSLSLSPG

SEQ ID NO: 4883 - protein, 433 aa, synthetic construct
  REGION 1..433: note = Ad_VK-x-CH1/Q38E/S183K/knob/LALA
DIQMTQSPSSLSASVGDRVTITCRASQGIRNYLAWYQEKPGKAPKLLIYAASTLQSGVPSRFSGSGSGTDFTLTISSLQPEDVATYYCQRYNRAPYTFGQGTKVEIKSSASTKGPSVFPLAPSSKSTSGGTAALGCLVKDYFPEPVTVSWNSGALTSGVHTFPAVLQSSGLYSLKSVVTVPSSSLGTQTYICNVNHKPSNTKVDKKVEPKSCDKTHTCPPCPAPEAAGGPSVFLFPPKPKDTLMISRTPEVTCVVVDVSHEDPEVKFNWYVDGVEVHNAKTKPREEQYNSTYRVVSVLTVLHQDWLNGKEYKCKVSNKALPAPIEKTGQPREPQVYTLPPCRDELTKNQVSLWCLVKGFYPSDIAVEWESNGQPENNYKTTPPVLDSDGSFFLYSKLTVDKSRWQQGNVFSCSVMHEALHNHYTQKSLSLSPG

SEQ ID NO: 4884 - protein, 433 aa, synthetic construct
  REGION 1..433: note = Ad_VK-x-CH1/Q38K/S183K/knob/LALA
DIQMTQSPSSLSASVGDRVTITCRASQGIRNYLAWYQKKPGKAPKLLIYAASTLQSGVPSRFSGSGSGTDFTLTISSLQPEDVATYYCQRYNRAPYTFGQGTKVEIKSSASTKGPSVFPLAPSSKSTSGGTAALGCLVKDYFPEPVTVSWNSGALTSGVHTFPAVLQSSGLYSLKSVVTVPSSSLGTQTYICNVNHKPSNTKVDKKVEPKSCDKTHTCPPCPAPEAAGGPSVFLFPPKPKDTLMISRTPEVTCVVVDVSHEDPEVKFNWYVDGVEVHNAKTKPREEQYNSTYRVVSVLTVLHQDWLNGKEYKCKVSNKALPAPIEKTGQPREPQVYTLPPCRDELTKNQVSLWCLVKGFYPSDIAVEWESNGQPENNYKTTPPVLDSDGSFFLYSKLTVDKSRWQQGNVFSCSVMHEALHNHYTQKSLSLSPG

SEQ ID NO: 4885 - protein, 601 aa, synthetic construct
  REGION 1..601: note = Ve_VH-CH1/Q39E/S183E/CLD201/hole/LALA/RF
QVQLVQSGAEVKKPGASVKVSCKGSGYTFTSYWMHWVREAPGQRLEWIGEIDPSESNTNYNQKFKGRVTLTVDISASTAYMELSSLRSEDTAVYYCARGGYDGWDYAIDYWGQGTLVTVSSASTKGPSVFPLAPSSKSTSGGTAALGCLVKDYFPEPVTVSWNSGALTSGVHTFPAVLQSSGLYSLESVVTVPSSSLGTQTYICNVNHKPSNTKVDKKVEPKSCTDWSPYADQSIKVRISLKSALGDKAYEWNDNEMYLFRSSVAYAMRQYFLKVKNQMILFGEEDVRVANLKPRISFNFFVTAPKNVSDIIPRTEVEKAIRMSRSRINDAFRLNDNSLEFLGIQPTLGPPNQPPVSTSTSPTRSMAPGAVHLPQPVSTRDKTHTCPPCPAPEAAGGPSVFLFPPKPKDTLMISRTPEVTCVVVDVSHEDPEVKFNWYVDGVEVHNAKTKPREEQYNSTYRVVSVLTVLHQDWLNGKEYKCKVSNKALPAPIEKTGQPREPQVCTLPPSRDELTKNQVSLSCAVKGFYPSDIAVEWESNGQPENNYKTTPPVLDSDGSFFLVSKLTVDKSRWQQGNVFSCSVMHEALHNRFTQKSLSLSPG

SEQ ID NO: 4886 - protein, 807 aa, synthetic construct
  REGION 1..807: note = TNFR1B_201/CLD201/Ad_VH-CH/N84S/hole/RF
LPAQVAFTPYAPEPGSTCRLREYYDQTAQMCCSKCSPGQHAKVFCTKTSDTVCDSCEDSTYTQLWNWVPECLSCGSRCSSDQVETQACTREQNRICTCRPGWYCALSKQEGCRLCAPLRKCRPGFGVARPGTETSDVVCKPCAPGTFSNTTSSTDICRPHQICNVVAIPGNASMDAVCTSTSPTRSMAPGAVHLPQPVSTRTDWSPYADQSIKVRISLKSALGDKAYEWNDNEMYLFRSSVAYAMRQYFLKVKNQMILFGEEDVRVANLKPRISFNFFVTAPKNVSDIIPRTEVEKAIRMSRSRINDAFRLNDNSLEFLGIQPTLGPPNQPPVSTSTSPTRSMAPGAVHLPQPVSTREVQLVESGGGLVQPGRSLRLSCAASGFTFDDYAMHWVRQAPGKGLEWVSAITWNSGHIDYADSVEGRFTISRDNAKNSLYLQMSSLRAEDTAVYYCAKVSYLSTASSLDYWGQGTLVTVSSASTKGPSVFPLAPSSKSTSGGTAALGCLVKDYFPEPVTVSWNSGALTSGVHTFPAVLQSSGLYSLSSVVTVPSSSLGTQTYICNVNHKPSNTKVDKKVEPKSCDKTHTCPPCPAPELLGGPSVFLFPPKPKDTLMISRTPEVTCVVVDVSHEDPEVKFNWYVDGVEVHNAKTKPREEQYNSTYRVVSVLTVLHQDWLNGKEYKCKVSNKALPAPIEKTISKAKGQPREPQVCTLPPSRDELTKNQVSLSCAVKGFYPSDIAVEWESNGQPENNYKTTPPVLDSDGSFFLVSKLTVDKSRWQQGNVFSCSVMHEALHNRFTQKSLSLSPG

SEQ ID NO: 4887 - protein, 795 aa, synthetic construct
  REGION 1..795: note = TNFR1B_201/CLD201/Ad_VK-x-CH/hole/RF
LPAQVAFTPYAPEPGSTCRLREYYDQTAQMCCSKCSPGQHAKVFCTKTSDTVCDSCEDSTYTQLWNWVPECLSCGSRCSSDQVETQACTREQNRICTCRPGWYCALSKQEGCRLCAPLRKCRPGFGVARPGTETSDVVCKPCAPGTFSNTTSSTDICRPHQICNVVAIPGNASMDAVCTSTSPTRSMAPGAVHLPQPVSTRTDWSPYADQSIKVRISLKSALGDKAYEWNDNEMYLFRSSVAYAMRQYFLKVKNQMILFGEEDVRVANLKPRISFNFFVTAPKNVSDIIPRTEVEKAIRMSRSRINDAFRLNDNSLEFLGIQPTLGPPNQPPVSTSTSPTRSMAPGAVHLPQPVSTRDIQMTQSPSSLSASVGDRVTITCRASQGIRNYLAWYQQKPGKAPKLLIYAASTLQSGVPSRFSGSGSGTDFTLTISSLQPEDVATYYCQRYNRAPYTFGQGTKVEIKSSASTKGPSVFPLAPSSKSTSGGTAALGCLVKDYFPEPVTVSWNSGALTSGVHTFPAVLQSSGLYSLSSVVTVPSSSLGTQTYICNVNHKPSNTKVDKKVEPKSCDKTHTCPPCPAPELLGGPSVFLFPPKPKDTLMISRTPEVTCVVVDVSHEDPEVKFNWYVDGVEVHNAKTKPREEQYNSTYRVVSVLTVLHQDWLNGKEYKCKVSNKALPAPIEKTISKAKGQPREPQVCTLPPSRDELTKNQVSLSCAVKGFYPSDIAVEWESNGQPENNYKTTPPVLDSDGSFFLVSKLTVDKSRWQQGNVFSCSVMHEALHNRFTQKSLSLSPG

SEQ ID NO: 4888 - protein, 805 aa, synthetic construct
  REGION 1..805: note = TNFR1B_201/CLD201/Us_VH-CH/N84S/hole/RF
LPAQVAFTPYAPEPGSTCRLREYYDQTAQMCCSKCSPGQHAKVFCTKTSDTVCDSCEDSTYTQLWNWVPECLSCGSRCSSDQVETQACTREQNRICTCRPGWYCALSKQEGCRLCAPLRKCRPGFGVARPGTETSDVVCKPCAPGTFSNTTSSTDICRPHQICNVVAIPGNASMDAVCTSTSPTRSMAPGAVHLPQPVSTRTDWSPYADQSIKVRISLKSALGDKAYEWNDNEMYLFRSSVAYAMRQYFLKVKNQMILFGEEDVRVANLKPRISFNFFVTAPKNVSDIIPRTEVEKAIRMSRSRINDAFRLNDNSLEFLGIQPTLGPPNQPPVSTSTSPTRSMAPGAVHLPQPVSTREVQLVQSGAEVKKPGESLKISCKGSGYSFTTYWLGWVRQMPGKGLDWIGIMSPVDSDIRYSPSFQGQVTMSVDKSITTAYLQWSSLKASDTAMYYCARRRPGQGYFDFWGQGTLVTVSSSSTKGPSVFPLAPSSKSTSGGTAALGCLVKDYFPEPVTVSWNSGALTSGVHTFPAVLQSSGLYSLSSVVTVPSSSLGTQTYICNVNHKPSNTKVDKRVEPKSCDKTHTCPPCPAPELLGGPSVFLFPPKPKDTLMISRTPEVTCVVVDVSHEDPEVKFNWYVDGVEVHNAKTKPREEQYNSTYRVVSVLTVLHQDWLNGKEYKCKVSNKALPAPIEKTISKAKGQPREPQVCTLPPSRDELTKNQVSLSCAVKGFYPSDIAVEWESNGQPENNYKTTPPVLDSDGSFFLVSKLTVDKSRWQQGNVFSCSVMHEALHNRFTQKSLSLSPG

SEQ ID NO: 4889 - protein, 795 aa, synthetic construct
  REGION 1..795: note = TNFR1B_201/CLD201/Us_VK-x-CH/hole/RF
LPAQVAFTPYAPEPGSTCRLREYYDQTAQMCCSKCSPGQHAKVFCTKTSDTVCDSCEDSTYTQLWNWVPECLSCGSRCSSDQVETQACTREQNRICTCRPGWYCALSKQEGCRLCAPLRKCRPGFGVARPGTETSDVVCKPCAPGTFSNTTSSTDICRPHQICNVVAIPGNASMDAVCTSTSPTRSMAPGAVHLPQPVSTRTDWSPYADQSIKVRISLKSALGDKAYEWNDNEMYLFRSSVAYAMRQYFLKVKNQMILFGEEDVRVANLKPRISFNFFVTAPKNVSDIIPRTEVEKAIRMSRSRINDAFRLNDNSLEFLGIQPTLGPPNQPPVSTSTSPTRSMAPGAVHLPQPVSTRDIQMTQSPSSLSASVGDRVTITCRASQGISSWLAWYQQKPEKAPKSLIYAASSLQSGVPSRFSGSGSGTDFTLTISSLQPEDFATYYCQQYNIYPYTFGQGTKVEIKSSSSTKGPSVFPLAPSSKSTSGGTAALGCLVKDYFPEPVTVSWNSGALTSGVHTFPAVLQSSGLYSLSSVVTVPSSSLGTQTYICNVNHKPSNTKVDKRVEPKSCDKTHTCPPCPAPELLGGPSVFLFPPKPKDTLMISRTPEVTCVVVDVSHEDPEVKFNWYVDGVEVHNAKTKPREEQYNSTYRVVSVLTVLHQDWLNGKEYKCKVSNKALPAPIEKTISKAKGQPREPQVCTLPPSRDELTKNQVSLSCAVKGFYPSDIAVEWESNGQPENNYKTTPPVLDSDGSFFLVSKLTVDKSRWQQGNVFSCSVMHEALHNRFTQKSLSLSPG

SEQ ID NO: 4890 - protein, 813 aa, synthetic construct
  REGION 1..813: note = TNFR1B_201/CLD201/Se_VH-CH/N84S/hole/RF
LPAQVAFTPYAPEPGSTCRLREYYDQTAQMCCSKCSPGQHAKVFCTKTSDTVCDSCEDSTYTQLWNWVPECLSCGSRCSSDQVETQACTREQNRICTCRPGWYCALSKQEGCRLCAPLRKCRPGFGVARPGTETSDVVCKPCAPGTFSNTTSSTDICRPHQICNVVAIPGNASMDAVCTSTSPTRSMAPGAVHLPQPVSTRTDWSPYADQSIKVRISLKSALGDKAYEWNDNEMYLFRSSVAYAMRQYFLKVKNQMILFGEEDVRVANLKPRISFNFFVTAPKNVSDIIPRTEVEKAIRMSRSRINDAFRLNDNSLEFLGIQPTLGPPNQPPVSTSTSPTRSMAPGAVHLPQPVSTREVQLVESGGGLVQPGGSLRLSCAASGFTFSNYWMNWVRQAPGKGLEWVAAINQDGSEKYYVGSVKGRFTISRDNAKNSLYLQMSSLRVEDTAVYYCVRDYYDILTDYYIHYWYFDLWGRGTLVTVSSASTKGPSVFPLAPSSKSTSGGTAALGCLVKDYFPEPVTVSWNSGALTSGVHTFPAVLQSSGLYSLSSVVTVPSSSLGTQTYICNVNHKPSNTKVDKRVEPKSCDKTHTCPPCPAPELLGGPSVFLFPPKPKDTLMISRTPEVTCVVVDVSHEDPEVKFNWYVDGVEVHNAKTKPREEQYNSTYRVVSVLTVLHQDWLNGKEYKCKVSNKALPAPIEKTISKAKGQPREPQVCTLPPSRDELTKNQVSLSCAVKGFYPSDIAVEWESNGQPENNYKTTPPVLDSDGSFFLVSKLTVDKSRWQQGNVFSCSVMHEALHNRFTQKSLSLSPG

SEQ ID NO: 4891 - protein, 796 aa, synthetic construct
  REGION 1..796: note = TNFR1B_201/CLD201/Se_VK-x-CH/hole/RF
LPAQVAFTPYAPEPGSTCRLREYYDQTAQMCCSKCSPGQHAKVFCTKTSDTVCDSCEDSTYTQLWNWVPECLSCGSRCSSDQVETQACTREQNRICTCRPGWYCALSKQEGCRLCAPLRKCRPGFGVARPGTETSDVVCKPCAPGTFSNTTSSTDICRPHQICNVVAIPGNASMDAVCTSTSPTRSMAPGAVHLPQPVSTRTDWSPYADQSIKVRISLKSALGDKAYEWNDNEMYLFRSSVAYAMRQYFLKVKNQMILFGEEDVRVANLKPRISFNFFVTAPKNVSDIIPRTEVEKAIRMSRSRINDAFRLNDNSLEFLGIQPTLGPPNQPPVSTSTSPTRSMAPGAVHLPQPVSTREIVLTQSPGTLSLSPGERATLSCRASQSVSSSYLAWYQQKPGQAPRLLIYGASSRATGIPDRFSGSGSGTDFTLTISRLEPEDFAVYYCQQYGSSPCTFGQGTKVEIKSSASTKGPSVFPLAPSSKSTSGGTAALGCLVKDYFPEPVTVSWNSGALTSGVHTFPAVLQSSGLYSLSSVVTVPSSSLGTQTYICNVNHKPSNTKVDKRVEPKSCDKTHTCPPCPAPELLGGPSVFLFPPKPKDTLMISRTPEVTCVVVDVSHEDPEVKFNWYVDGVEVHNAKTKPREEQYNSTYRVVSVLTVLHQDWLNGKEYKCKVSNKALPAPIEKTISKAKGQPREPQVCTLPPSRDELTKNQVSLSCAVKGFYPSDIAVEWESNGQPENNYKTTPPVLDSDGSFFLVSKLTVDKSRWQQGNVFSCSVMHEALHNRFTQKSLSLSPG

SEQ ID NO: 4892 - protein, 807 aa, synthetic construct
  REGION 1..807: note = TNFR1B_201/CLD201/Ve_VH-CH/hole/LALA/RF
LPAQVAFTPYAPEPGSTCRLREYYDQTAQMCCSKCSPGQHAKVFCTKTSDTVCDSCEDSTYTQLWNWVPECLSCGSRCSSDQVETQACTREQNRICTCRPGWYCALSKQEGCRLCAPLRKCRPGFGVARPGTETSDVVCKPCAPGTFSNTTSSTDICRPHQICNVVAIPGNASMDAVCTSTSPTRSMAPGAVHLPQPVSTRTDWSPYADQSIKVRISLKSALGDKAYEWNDNEMYLFRSSVAYAMRQYFLKVKNQMILFGEEDVRVANLKPRISFNFFVTAPKNVSDIIPRTEVEKAIRMSRSRINDAFRLNDNSLEFLGIQPTLGPPNQPPVSTSTSPTRSMAPGAVHLPQPVSTRQVQLVQSGAEVKKPGASVKVSCKGSGYTFTSYWMHWVRQAPGQRLEWIGEIDPSESNTNYNQKFKGRVTLTVDISASTAYMELSSLRSEDTAVYYCARGGYDGWDYAIDYWGQGTLVTVSSASTKGPSVFPLAPSSKSTSGGTAALGCLVKDYFPEPVTVSWNSGALTSGVHTFPAVLQSSGLYSLSSVVTVPSSSLGTQTYICNVNHKPSNTKVDKKVEPKSCDKTHTCPPCPAPEAAGGPSVFLFPPKPKDTLMISRTPEVTCVVVDVSHEDPEVKFNWYVDGVEVHNAKTKPREEQYNSTYRVVSVLTVLHQDWLNGKEYKCKVSNKALPAPIEKTISKAKGQPREPQVCTLPPSRDELTKNQVSLSCAVKGFYPSDIAVEWESNGQPENNYKTTPPVLDSDGSFFLVSKLTVDKSRWQQGNVFSCSVMHEALHNRFTQKSLSLSPG

SEQ ID NO: 4893 - protein, 800 aa, synthetic construct
  REGION 1..800: note = TNFR1B_201/CLD201/Ve_VK-x-CH/hole/LALA/RF
LPAQVAFTPYAPEPGSTCRLREYYDQTAQMCCSKCSPGQHAKVFCTKTSDTVCDSCEDSTYTQLWNWVPECLSCGSRCSSDQVETQACTREQNRICTCRPGWYCALSKQEGCRLCAPLRKCRPGFGVARPGTETSDVVCKPCAPGTFSNTTSSTDICRPHQICNVVAIPGNASMDAVCTSTSPTRSMAPGAVHLPQPVSTRTDWSPYADQSIKVRISLKSALGDKAYEWNDNEMYLFRSSVAYAMRQYFLKVKNQMILFGEEDVRVANLKPRISFNFFVTAPKNVSDIIPRTEVEKAIRMSRSRINDAFRLNDNSLEFLGIQPTLGPPNQPPVSTSTSPTRSMAPGAVHLPQPVSTRDVVMTQSPLSLPVTPGEPASISCRSSQSLAKSYGNTYLSWYLQKPGQSPQLLIYGISNRFSGVPDRFSGSGSGTDFTLKISRVEAEDVGVYYCLQGTHQPYTFGQGTKVEIKSSASTKGPSVFPLAPSSKSTSGGTAALGCLVKDYFPEPVTVSWNSGALTSGVHTFPAVLQSSGLYSLSSVVTVPSSSLGTQTYICNVNHKPSNTKVDKKVEPKSCDKTHTCPPCPAPEAAGGPSVFLFPPKPKDTLMISRTPEVTCVVVDVSHEDPEVKFNWYVDGVEVHNAKTKPREEQYNSTYRVVSVLTVLHQDWLNGKEYKCKVSNKALPAPIEKTISKAKGQPREPQVCTLPPSRDELTKNQVSLSCAVKGFYPSDIAVEWESNGQPENNYKTTPPVLDSDGSFFLVSKLTVDKSRWQQGNVFSCSVMHEALHNRFTQKSLSLSPG

SEQ ID NO: 4894 - protein, 214 aa, synthetic construct
  REGION 1..214: note = Ad_VK-CK/Q38E/V133K
DIQMTQSPSSLSASVGDRVTITCRASQGIRNYLAWYQEKPGKAPKLLIYAASTLQSGVPSRFSGSGSGTDFTLTISSLQPEDVATYYCQRYNRAPYTFGQGTKVEIKRTVAAPSVFIFPPSDEQLKSGTASVKCLLNNFYPREAKVQWKVDNALQSGNSQESVTEQDSKDSTYSLSSTLTLSKADYEKHKVYACEVTHQGLSSPVTKSFNRGEC

SEQ ID NO: 4895 - protein, 226 aa, synthetic construct
  REGION 1..226: note = Us_VH-x-CK/N84S/Q39K/V133E
EVQLVQSGAEVKKPGESLKISCKGSGYSFTTYWLGWVRKMPGKGLDWIGIMSPVDSDIRYSPSFQGQVTMSVDKSITTAYLQWSSLKASDTAMYYCARRRPGQGYFDFWGQGTLVTVSSASVAAPSVFIFPPSDEQLKSGTASVECLLNNFYPREAKVQWKVDNALQSGNSQESVTEQDSKDSTYSLSSTLTLSKADYEKHKVYACEVTHQGLSSPVTKSFNRGEC

SEQ ID NO: 4896 - protein, 226 aa, synthetic construct
  REGION 1..226: note = Us_VH-x-CK/N84S/Q39E/V133E
EVQLVQSGAEVKKPGESLKISCKGSGYSFTTYWLGWVREMPGKGLDWIGIMSPVDSDIRYSPSFQGQVTMSVDKSITTAYLQWSSLKASDTAMYYCARRRPGQGYFDFWGQGTLVTVSSASVAAPSVFIFPPSDEQLKSGTASVECLLNNFYPREAKVQWKVDNALQSGNSQESVTEQDSKDSTYSLSSTLTLSKADYEKHKVYACEVTHQGLSSPVTKSFNRGEC

SEQ ID NO: 4897 - protein, 214 aa, synthetic construct
  REGION 1..214: note = Ad_VK-CK/Q38K/V133K
DIQMTQSPSSLSASVGDRVTITCRASQGIRNYLAWYQKKPGKAPKLLIYAASTLQSGVPSRFSGSGSGTDFTLTISSLQPEDVATYYCQRYNRAPYTFGQGTKVEIKRTVAAPSVFIFPPSDEQLKSGTASVKCLLNNFYPREAKVQWKVDNALQSGNSQESVTEQDSKDSTYSLSSTLTLSKADYEKHKVYACEVTHQGLSSPVTKSFNRGEC

SEQ ID NO: 4898 - protein, 214 aa, synthetic construct
  REGION 1..214: note = Us_VK-CK/Q38E/V133K
DIQMTQSPSSLSASVGDRVTITCRASQGISSWLAWYQEKPEKAPKSLIYAASSLQSGVPSRFSGSGSGTDFTLTISSLQPEDFATYYCQQYNIYPYTFGQGTKLEIKRTVAAPSVFIFPPSDEQLKSGTASVKCLLNNFYPREAKVQWKVDNALQSGNSQESVTEQDSKDSTYSLSSTLTLSKADYEKHKVYACEVTHQGLSSPVTKSFNRGEC

SEQ ID NO: 4899 - protein, 228 aa, synthetic construct
  REGION 1..228: note = Ad_VH-x-CK/N84S/Q39K/V133E
EVQLVESGGGLVQPGRSLRLSCAASGFTFDDYAMHWVRKAPGKGLEWVSAITWNSGHIDYADSVEGRFTISRDNAKNSLYLQMSSLRAEDTAVYYCAKVSYLSTASSLDYWGQGTLVTVSSASVAAPSVFIFPPSDEQLKSGTASVECLLNNFYPREAKVQWKVDNALQSGNSQESVTEQDSKDSTYSLSSTLTLSKADYEKHKVYACEVTHQGLSSPVTKSFNRGEC

SEQ ID NO: 4900 - protein, 228 aa, synthetic construct
  REGION 1..228: note = Ad_VH-x-CK/N84S/Q39E/V133E
EVQLVESGGGLVQPGRSLRLSCAASGFTFDDYAMHWVREAPGKGLEWVSAITWNSGHIDYADSVEGRFTISRDNAKNSLYLQMSSLRAEDTAVYYCAKVSYLSTASSLDYWGQGTLVTVSSASVAAPSVFIFPPSDEQLKSGTASVECLLNNFYPREAKVQWKVDNALQSGNSQESVTEQDSKDSTYSLSSTLTLSKADYEKHKVYACEVTHQGLSSPVTKSFNRGEC

SEQ ID NO: 4901 - protein, 214 aa, synthetic construct
  REGION 1..214: note = Us_VK-CK/Q38K/V133K
DIQMTQSPSSLSASVGDRVTITCRASQGISSWLAWYQKKPEKAPKSLIYAASSLQSGVPSRFSGSGSGTDFTLTISSLQPEDFATYYCQQYNIYPYTFGQGTKLEIKRTVAAPSVFIFPPSDEQLKSGTASVKCLLNNFYPREAKVQWKVDNALQSGNSQESVTEQDSKDSTYSLSSTLTLSKADYEKHKVYACEVTHQGLSSPVTKSFNRGEC

SEQ ID NO: 4902 - protein, 234 aa, synthetic construct
  REGION 1..234: note = Se_VH-x-CK/N84S/Q39K/V133E
EVQLVESGGGLVQPGGSLRLSCAASGFTFSNYWMNWVRKAPGKGLEWVAAINQDGSEKYYVGSVKGRFTISRDNAKNSLYLQMSSLRVEDTAVYYCVRDYYDILTDYYIHYWYFDLWGRGTLVTVSSASVAAPSVFIFPPSDEQLKSGTASVECLLNNFYPREAKVQWKVDNALQSGNSQESVTEQDSKDSTYSLSSTLTLSKADYEKHKVYACEVTHQGLSSPVTKSFNRGEC

SEQ ID NO: 4903 - protein, 234 aa, synthetic construct
  REGION 1..234: note = Se_VH-x-CK/N84S/Q39E/V133E
EVQLVESGGGLVQPGGSLRLSCAASGFTFSNYWMNWVREAPGKGLEWVAAINQDGSEKYYVGSVKGRFTISRDNAKNSLYLQMSSLRVEDTAVYYCVRDYYDILTDYYIHYWYFDLWGRGTLVTVSSASVAAPSVFIFPPSDEQLKSGTASVECLLNNFYPREAKVQWKVDNALQSGNSQESVTEQDSKDSTYSLSSTLTLSKADYEKHKVYACEVTHQGLSSPVTKSFNRGEC

SEQ ID NO: 4904 - protein, 215 aa, synthetic construct
  REGION 1..215: note = Se_VK-CK/Q38E/V133K
EIVLTQSPGTLSLSPGERATLSCRASQSVSSSYLAWYQEKPGQAPRLLIYGASSRATGIPDRFSGSGSGTDFTLTISRLEPEDFAVYYCQQYGSSPCTFGQGTKVEIKRTVAAPSVFIFPPSDEQLKSGTASVKCLLNNFYPREAKVQWKVDNALQSGNSQESVTEQDSKDSTYSLSSTLTLSKADYEKHKVYACEVTHQGLSSPVTKSFNRGEC

SEQ ID NO: 4905 - protein, 215 aa, synthetic construct
  REGION 1..215: note = Se_VK-CK/Q38K/V133K
EIVLTQSPGTLSLSPGERATLSCRASQSVSSSYLAWYQKKPGQAPRLLIYGASSRATGIPDRFSGSGSGTDFTLTISRLEPEDFAVYYCQQYGSSPCTFGQGTKVEIKRTVAAPSVFIFPPSDEQLKSGTASVKCLLNNFYPREAKVQWKVDNALQSGNSQESVTEQDSKDSTYSLSSTLTLSKADYEKHKVYACEVTHQGLSSPVTKSFNRGEC

SEQ ID NO: 4906 - protein, 228 aa, synthetic construct
  REGION 1..228: note = Ve_VH-x-CK/Q39K/V133E
QVQLVQSGAEVKKPGASVKVSCKGSGYTFTSYWMHWVRKAPGQRLEWIGEIDPSESNTNYNQKFKGRVTLTVDISASTAYMELSSLRSEDTAVYYCARGGYDGWDYAIDYWGQGTLVTVSSASVAAPSVFIFPPSDEQLKSGTASVECLLNNFYPREAKVQWKVDNALQSGNSQESVTEQDSKDSTYSLSSTLTLSKADYEKHKVYACEVTHQGLSSPVTKSFNRGEC

SEQ ID NO: 4907 - protein, 228 aa, synthetic construct
  REGION 1..228: note = Ve_VH-x-CK/Q39E/V133E
QVQLVQSGAEVKKPGASVKVSCKGSGYTFTSYWMHWVREAPGQRLEWIGEIDPSESNTNYNQKFKGRVTLTVDISASTAYMELSSLRSEDTAVYYCARGGYDGWDYAIDYWGQGTLVTVSSASVAAPSVFIFPPSDEQLKSGTASVECLLNNFYPREAKVQWKVDNALQSGNSQESVTEQDSKDSTYSLSSTLTLSKADYEKHKVYACEVTHQGLSSPVTKSFNRGEC

SEQ ID NO: 4908 - protein, 219 aa, synthetic construct
  REGION 1..219: note = Ve_VK-CK/Q38E/V133K
DVVMTQSPLSLPVTPGEPASISCRSSQSLAKSYGNTYLSWYLEKPGQSPQLLIYGISNRFSGVPDRFSGSGSGTDFTLKISRVEAEDVGVYYCLQGTHQPYTFGQGTKVEIKRTVAAPSVFIFPPSDEQLKSGTASVKCLLNNFYPREAKVQWKVDNALQSGNSQESVTEQDSKDSTYSLSSTLTLSKADYEKHKVYACEVTHQGLSSPVTKSFNRGEC

SEQ ID NO: 4909 - protein, 219 aa, synthetic construct
  REGION 1..219: note = Ve_VK-CK/Q38K/V133K
DVVMTQSPLSLPVTPGEPASISCRSSQSLAKSYGNTYLSWYLKKPGQSPQLLIYGISNRFSGVPDRFSGSGSGTDFTLKISRVEAEDVGVYYCLQGTHQPYTFGQGTKVEIKRTVAAPSVFIFPPSDEQLKSGTASVKCLLNNFYPREAKVQWKVDNALQSGNSQESVTEQDSKDSTYSLSSTLTLSKADYEKHKVYACEVTHQGLSSPVTKSFNRGEC

SEQ ID NO: 4910 - protein, 214 aa, synthetic construct; identical to SEQ ID NO: 238
  REGION 1..214: note = Ad_VK-CK

SEQ ID NO: 4911 - protein, 228 aa, synthetic construct
  REGION 1..228: note = Ad_VH-x-CK/N84S
EVQLVESGGGLVQPGRSLRLSCAASGFTFDDYAMHWVRQAPGKGLEWVSAITWNSGHIDYADSVEGRFTISRDNAKNSLYLQMSSLRAEDTAVYYCAKVSYLSTASSLDYWGQGTLVTVSSRTVAAPSVFIFPPSDEQLKSGTASVVCLLNNFYPREAKVQWKVDNALQSGNSQESVTEQDSKDSTYSLSSTLTLSKADYEKHKVYACEVTHQGLSSPVTKSFNRGEC

SEQ ID NO: 4912 - protein, 214 aa, synthetic construct; identical to SEQ ID NO: 4858
  REGION 1..214: note = Us_VK-CK

SEQ ID NO: 4913 - protein, 226 aa, synthetic construct
  REGION 1..226: note = Us_VH-x-CK/N84S
EVQLVQSGAEVKKPGESLKISCKGSGYSFTTYWLGWVRQMPGKGLDWIGIMSPVDSDIRYSPSFQGQVTMSVDKSITTAYLQWSSLKASDTAMYYCARRRPGQGYFDFWGQGTLVTVSSRTVAAPSVFIFPPSDEQLKSGTASVVCLLNNFYPREAKVQWKVDNALQSGNSQESVTEQDSKDSTYSLSSTLTLSKADYEKHKVYACEVTHQGLSSPVTKSFNRGEC

SEQ ID NO: 4914 - protein, 215 aa, synthetic construct; identical to SEQ ID NO: 4859
  REGION 1..215: note = Se_VK-CK

SEQ ID NO: 4915 - protein, 234 aa, synthetic construct
  REGION 1..234: note = Se_VH-x-CK/N84S
EVQLVESGGGLVQPGGSLRLSCAASGFTFSNYWMNWVRQAPGKGLEWVAAINQDGSEKYYVGSVKGRFTISRDNAKNSLYLQMSSLRVEDTAVYYCVRDYYDILTDYYIHYWYFDLWGRGTLVTVSSRTVAAPSVFIFPPSDEQLKSGTASVVCLLNNFYPREAKVQWKVDNALQSGNSQESVTEQDSKDSTYSLSSTLTLSKADYEKHKVYACEVTHQGLSSPVTKSFNRGEC

SEQ ID NO: 4916 - protein, 219 aa, synthetic construct; identical to SEQ ID NO: 4857
  REGION 1..219: note = Ve_VK-CK

SEQ ID NO: 4917 - protein, 228 aa, synthetic construct
  REGION 1..228: note = Ve_VH-x-CK
QVQLVQSGAEVKKPGASVKVSCKGSGYTFTSYWMHWVRQAPGQRLEWIGEIDPSESNTNYNQKFKGRVTLTVDISASTAYMELSSLRSEDTAVYYCARGGYDGWDYAIDYWGQGTLVTVSSRTVAAPSVFIFPPSDEQLKSGTASVVCLLNNFYPREAKVQWKVDNALQSGNSQESVTEQDSKDSTYSLSSTLTLSKADYEKHKVYACEVTHQGLSSPVTKSFNRGEC

SEQ ID NO: 4918 - protein, 221 aa, synthetic construct; identical to SEQ ID NO: 4828
  REGION 1..221: note = Fc6/knob

SEQ ID NO: 4919 - protein, 221 aa, synthetic construct
  REGION 1..221: note = Fc6/knob/LALA
CPPCPAPEAAGGPSVFLFPPKPKDTLMISRTPEVTCVVVDVSHEDPEVKFNWYVDGVEVHNAKTKPREEQYNSTYRVVSVLTVLHQDWLNGKEYKCKVSNKALPAPIEKTISKAKGQPREPQVYTLPPCRDELTKNQVSLWCLVKGFYPSDIAVEWESNGQPENNYKTTPPVLDSDGSFFLYSKLTVDKSRWQQGNVFSCSVMHEALHNHYTQKSLSLSPG

SEQ ID NO: 4920 - protein, 605 aa, synthetic construct
  REGION 1..605: note = Pe_VH-CH1/Q39K/S183E/CLD201/hole/PGLALA/RF
QVQLVQSGVEVKKPGASVKVSCKASGYTFTNYYMYWVRKAPGQGLEWMGGINPSNGGTNFNEKFKNRVTLTTDSSTTTAYMELKSLQFDDTAVYYCARRDYRFDMGFDYWGQGTTVTVSSASTKGPSVFPLAPSSKSTSGGTAALGCLVKDYFPEPVTVSWNSGALTSGVHTFPAVLQSSGLYSLESVVTVPSSSLGTQTYICNVNHKPSNTKVDKKVEPKSCTDWSPYADQSIKVRISLKSALGDKAYEWNDNEMYLFRSSVAYAMRQYFLKVKNQMILFGEEDVRVANLKPRISFNFFVTAPKNVSDIIPRTEVEKAIRMSRSRINDAFRLNDNSLEFLGIQPTLGPPNQPPVSTSTSPTRSMAPGAVHLPQPVSTRDKTHTCPPCPAPEAAGGPSVFLFPPKPKDTLMISRTPEVTCVVVDVSHEDPEVKFNWYVDGVEVHNAKTKPREEQYNSTYRVVSVLTVLHQDWLNGKEYKCKVSNKALGAPIEKTISKAKGQPREPQVCTLPPSRDELTKNQVSLSCAVKGFYPSDIAVEWESNGQPENNYKTTPPVLDSDGSFFLVSKLTVDKSRWQQGNVFSCSVMHEALHNRFTQKSLSLSPG

SEQ ID NO: 4921 - protein, 439 aa, synthetic construct
  REGION 1..439: note = Ip_VK-x-CH1/Q38E/S183K/knob/PGLALA
EIVLTQSPGTLSLSPGERATLSCRASQSVGSSYLAWYQEKPGQAPRLLIYGAFSRATGIPDRFSGSGSGTDFTLTISRLEPEDFAVYYCQQYGSSPWTFGQGTKVEIKSSASTKGPSVFPLAPSSKSTSGGTAALGCLVKDYFPEPVTVSWNSGALTSGVHTFPAVLQSSGLYSLKSVVTVPSSSLGTQTYICNVNHKPSNTKVDKKVEPKSCDKTHTCPPCPAPEAAGGPSVFLFPPKPKDTLMISRTPEVTCVVVDVSHEDPEVKFNWYVDGVEVHNAKTKPREEQYNSTYRVVSVLTVLHQDWLNGKEYKCKVSNKALGAPIEKTISKAKGQPREPQVYTLPPCRDELTKNQVSLWCLVKGFYPSDIAVEWESNGQPENNYKTTPPVLDSDGSFFLYSKLTVDKSRWQQGNVFSCSVMHEALHNHYTQKSLSLSPG

SEQ ID NO: 4922 - protein, 439 aa, synthetic construct
  REGION 1..439: note = Ip_VK-x-CH1/Q38K/S183K/knob/PGLALA
EIVLTQSPGTLSLSPGERATLSCRASQSVGSSYLAWYQKKPGQAPRLLIYGAFSRATGIPDRFSGSGSGTDFTLTISRLEPEDFAVYYCQQYGSSPWTFGQGTKVEIKSSASTKGPSVFPLAPSSKSTSGGTAALGCLVKDYFPEPVTVSWNSGALTSGVHTFPAVLQSSGLYSLKSVVTVPSSSLGTQTYICNVNHKPSNTKVDKKVEPKSCDKTHTCPPCPAPEAAGGPSVFLFPPKPKDTLMISRTPEVTCVVVDVSHEDPEVKFNWYVDGVEVHNAKTKPREEQYNSTYRVVSVLTVLHQDWLNGKEYKCKVSNKALGAPIEKTISKAKGQPREPQVYTLPPCRDELTKNQVSLWCLVKGFYPSDIAVEWESNGQPENNYKTTPPVLDSDGSFFLYSKLTVDKSRWQQGNVFSCSVMHEALHNHYTQKSLSLSPG

SEQ ID NO: 4923 - protein, 605 aa, synthetic construct
  REGION 1..605: note = Pe_VH-CH1/Q39E/S183E/CLD201/hole/PGLALA/RF
QVQLVQSGVEVKKPGASVKVSCKASGYTFTNYYMYWVREAPGQGLEWMGGINPSNGGTNFNEKFKNRVTLTTDSSTTTAYMELKSLQFDDTAVYYCARRDYRFDMGFDYWGQGTTVTVSSASTKGPSVFPLAPSSKSTSGGTAALGCLVKDYFPEPVTVSWNSGALTSGVHTFPAVLQSSGLYSLESVVTVPSSSLGTQTYICNVNHKPSNTKVDKKVEPKSCTDWSPYADQSIKVRISLKSALGDKAYEWNDNEMYLFRSSVAYAMRQYFLKVKNQMILFGEEDVRVANLKPRISFNFFVTAPKNVSDIIPRTEVEKAIRMSRSRINDAFRLNDNSLEFLGIQPTLGPPNQPPVSTSTSPTRSMAPGAVHLPQPVSTRDKTHTCPPCPAPEAAGGPSVFLFPPKPKDTLMISRTPEVTCVVVDVSHEDPEVKFNWYVDGVEVHNAKTKPREEQYNSTYRVVSVLTVLHQDWLNGKEYKCKVSNKALGAPIEKTISKAKGQPREPQVCTLPPSRDELTKNQVSLSCAVKGFYPSDIAVEWESNGQPENNYKTTPPVLDSDGSFFLVSKLTVDKSRWQQGNVFSCSVMHEALHNRFTQKSLSLSPG

SEQ ID NO: 4924 - protein, 439 aa, synthetic construct
  REGION 1..439: note = Ip_VK-x-CH1/Q38E/S183K/knob/PGLALA/RF
EIVLTQSPGTLSLSPGERATLSCRASQSVGSSYLAWYQEKPGQAPRLLIYGAFSRATGIPDRFSGSGSGTDFTLTISRLEPEDFAVYYCQQYGSSPWTFGQGTKVEIKSSASTKGPSVFPLAPSSKSTSGGTAALGCLVKDYFPEPVTVSWNSGALTSGVHTFPAVLQSSGLYSLKSVVTVPSSSLGTQTYICNVNHKPSNTKVDKKVEPKSCDKTHTCPPCPAPEAAGGPSVFLFPPKPKDTLMISRTPEVTCVVVDVSHEDPEVKFNWYVDGVEVHNAKTKPREEQYNSTYRVVSVLTVLHQDWLNGKEYKCKVSNKALGAPIEKTISKAKGQPREPQVYTLPPCRDELTKNQVSLWCLVKGFYPSDIAVEWESNGQPENNYKTTPPVLDSDGSFFLYSKLTVDKSRWQQGNVFSCSVMHEALHNRFTQKSLSLSPG

SEQ ID NO: 4925 - protein, 439 aa, synthetic construct
  REGION 1..439: note = Ip_VK-x-CH1/Q38K/S183K/knob/PGLALA/RF
EIVLTQSPGTLSLSPGERATLSCRASQSVGSSYLAWYQKKPGQAPRLLIYGAFSRATGIPDRFSGSGSGTDFTLTISRLEPEDFAVYYCQQYGSSPWTFGQGTKVEIKSSASTKGPSVFPLAPSSKSTSGGTAALGCLVKDYFPEPVTVSWNSGALTSGVHTFPAVLQSSGLYSLKSVVTVPSSSLGTQTYICNVNHKPSNTKVDKKVEPKSCDKTHTCPPCPAPEAAGGPSVFLFPPKPKDTLMISRTPEVTCVVVDVSHEDPEVKFNWYVDGVEVHNAKTKPREEQYNSTYRVVSVLTVLHQDWLNGKEYKCKVSNKALGAPIEKTISKAKGQPREPQVYTLPPCRDELTKNQVSLWCLVKGFYPSDIAVEWESNGQPENNYKTTPPVLDSDGSFFLYSKLTVDKSRWQQGNVFSCSVMHEALHNRFTQKSLSLSPG

SEQ ID NO: 4926 - protein, 603 aa, synthetic construct
  REGION 1..603: note = Ip_VH-CH1/N84S/Q39K/S183E/CLD201/hole/PGLALA/RF
QVQLVESGGGVVQPGRSLRLSCAASGFTFSSYTMHWVRKAPGKGLEWVTFISYDGNNKYYADSVKGRFTISRDNSKNTLYLQMSSLRAEDTAIYYCARTGWLGPFDYWGQGTLVTVSSASTKGPSVFPLAPSSKSTSGGTAALGCLVKDYFPEPVTVSWNSGALTSGVHTFPAVLQSSGLYSLESVVTVPSSSLGTQTYICNVNHKPSNTKVDKKVEPKSCTDWSPYADQSIKVRISLKSALGDKAYEWNDNEMYLFRSSVAYAMRQYFLKVKNQMILFGEEDVRVANLKPRISFNFFVTAPKNVSDIIPRTEVEKAIRMSRSRINDAFRLNDNSLEFLGIQPTLGPPNQPPVSTSTSPTRSMAPGAVHLPQPVSTRDKTHTCPPCPAPEAAGGPSVFLFPPKPKDTLMISRTPEVTCVVVDVSHEDPEVKFNWYVDGVEVHNAKTKPREEQYNSTYRVVSVLTVLHQDWLNGKEYKCKVSNKALGAPIEKTISKAKGQPREPQVCTLPPSRDELTKNQVSLSCAVKGFYPSDIAVEWESNGQPENNYKTTPPVLDSDGSFFLVSKLTVDKSRWQQGNVFSCSVMHEALHNRFTQKSLSLSPG

SEQ ID NO: 4927 - protein, 442 aa, synthetic construct
  REGION 1..442: note = Pe_VK-x-CH1/Q38E/S183K/knob/PGLALA
EIVLTQSPATLSLSPGERATLSCRASKGVSTSGYSYLHWYQEKPGQAPRLLIYLASYLESGVPARFSGSGSGTDFTLTISSLEPEDFAVYYCQHSRDLPLTFGGGTKVEIKSSASTKGPSVFPLAPSSKSTSGGTAALGCLVKDYFPEPVTVSWNSGALTSGVHTFPAVLQSSGLYSLKSVVTVPSSSLGTQTYICNVNHKPSNTKVDKKVEPKSCDKTHTCPPCPAPEAAGGPSVFLFPPKPKDTLMISRTPEVTCVVVDVSHEDPEVKFNWYVDGVEVHNAKTKPREEQYNSTYRVVSVLTVLHQDWLNGKEYKCKVSNKALGAPIEKTISKAKGQPREPQVYTLPPCRDELTKNQVSLWCLVKGFYPSDIAVEWESNGQPENNYKTTPPVLDSDGSFFLYSKLTVDKSRWQQGNVFSCSVMHEALHNHYTQKSLSLSPG

SEQ ID NO: 4928 - protein, 442 aa, synthetic construct
  REGION 1..442: note = Pe_VK-x-CH1/Q38K/S183K/knob/PGLALA
EIVLTQSPATLSLSPGERATLSCRASKGVSTSGYSYLHWYQKKPGQAPRLLIYLASYLESGVPARFSGSGSGTDFTLTISSLEPEDFAVYYCQHSRDLPLTFGGGTKVEIKSSASTKGPSVFPLAPSSKSTSGGTAALGCLVKDYFPEPVTVSWNSGALTSGVHTFPAVLQSSGLYSLKSVVTVPSSSLGTQTYICNVNHKPSNTKVDKKVEPKSCDKTHTCPPCPAPEAAGGPSVFLFPPKPKDTLMISRTPEVTCVVVDVSHEDPEVKFNWYVDGVEVHNAKTKPREEQYNSTYRVVSVLTVLHQDWLNGKEYKCKVSNKALGAPIEKTISKAKGQPREPQVYTLPPCRDELTKNQVSLWCLVKGFYPSDIAVEWESNGQPENNYKTTPPVLDSDGSFFLYSKLTVDKSRWQQGNVFSCSVMHEALHNHYTQKSLSLSPG

SEQ ID NO: 4929 - protein, 603 aa, synthetic construct
  REGION 1..603: note = Ip_VH-CH1/N84S/Q39E/S183E/CLD201/hole/PGLALA/RF
QVQLVESGGGVVQPGRSLRLSCAASGFTFSSYTMHWVREAPGKGLEWVTFISYDGNNKYYADSVKGRFTISRDNSKNTLYLQMSSLRAEDTAIYYCARTGWLGPFDYWGQGTLVTVSSASTKGPSVFPLAPSSKSTSGGTAALGCLVKDYFPEPVTVSWNSGALTSGVHTFPAVLQSSGLYSLESVVTVPSSSLGTQTYICNVNHKPSNTKVDKKVEPKSCTDWSPYADQSIKVRISLKSALGDKAYEWNDNEMYLFRSSVAYAMRQYFLKVKNQMILFGEEDVRVANLKPRISFNFFVTAPKNVSDIIPRTEVEKAIRMSRSRINDAFRLNDNSLEFLGIQPTLGPPNQPPVSTSTSPTRSMAPGAVHLPQPVSTRDKTHTCPPCPAPEAAGGPSVFLFPPKPKDTLMISRTPEVTCVVVDVSHEDPEVKFNWYVDGVEVHNAKTKPREEQYNSTYRVVSVLTVLHQDWLNGKEYKCKVSNKALGAPIEKTISKAKGQPREPQVCTLPPSRDELTKNQVSLSCAVKGFYPSDIAVEWESNGQPENNYKTTPPVLDSDGSFFLVSKLTVDKSRWQQGNVFSCSVMHEALHNRFTQKSLSLSPG

SEQ ID NO: 4930 - protein, 605 aa, synthetic construct
  REGION 1..605: note = 388D4-3_VH-CH1/Q39K/S183E/CLD201/hole/PGLALA/RF
EVQLVQSGAEVKKPGASVKVSCKASGYTFTDYEMHWVRKAPGQGLEWMGIIDPGTGGTAYNQKFQGRVTMTADKSTSTVYMELSSLRSEDTAVYYCTSEKFGSNYYFDYWGQGTLVTVSSASTKGPSVFPLAPSSKSTSGGTAALGCLVKDYFPEPVTVSWNSGALTSGVHTFPAVLQSSGLYSLESVVTVPSSSLGTQTYICNVNHKPSNTKVDKKVEPKSCTDWSPYADQSIKVRISLKSALGDKAYEWNDNEMYLFRSSVAYAMRQYFLKVKNQMILFGEEDVRVANLKPRISFNFFVTAPKNVSDIIPRTEVEKAIRMSRSRINDAFRLNDNSLEFLGIQPTLGPPNQPPVSTSTSPTRSMAPGAVHLPQPVSTRDKTHTCPPCPAPEAAGGPSVFLFPPKPKDTLMISRTPEVTCVVVDVSHEDPEVKFNWYVDGVEVHNAKTKPREEQYNSTYRVVSVLTVLHQDWLNGKEYKCKVSNKALGAPIEKTISKAKGQPREPQVCTLPPSRDELTKNQVSLSCAVKGFYPSDIAVEWESNGQPENNYKTTPPVLDSDGSFFLVSKLTVDKSRWQQGNVFSCSVMHEALHNRFTQKSLSLSPG

SEQ ID NO: 4931 - protein, 605 aa, synthetic construct
  REGION 1..605: note = 388D4-3_VH-CH1/Q39E/S183E/CLD201/hole/PGLALA/RF
EVQLVQSGAEVKKPGASVKVSCKASGYTFTDYEMHWVREAPGQGLEWMGIIDPGTGGTAYNQKFQGRVTMTADKSTSTVYMELSSLRSEDTAVYYCTSEKFGSNYYFDYWGQGTLVTVSSASTKGPSVFPLAPSSKSTSGGTAALGCLVKDYFPEPVTVSWNSGALTSGVHTFPAVLQSSGLYSLESVVTVPSSSLGTQTYICNVNHKPSNTKVDKKVEPKSCTDWSPYADQSIKVRISLKSALGDKAYEWNDNEMYLFRSSVAYAMRQYFLKVKNQMILFGEEDVRVANLKPRISFNFFVTAPKNVSDIIPRTEVEKAIRMSRSRINDAFRLNDNSLEFLGIQPTLGPPNQPPVSTSTSPTRSMAPGAVHLPQPVSTRDKTHTCPPCPAPEAAGGPSVFLFPPKPKDTLMISRTPEVTCVVVDVSHEDPEVKFNWYVDGVEVHNAKTKPREEQYNSTYRVVSVLTVLHQDWLNGKEYKCKVSNKALGAPIEKTISKAKGQPREPQVCTLPPSRDELTKNQVSLSCAVKGFYPSDIAVEWESNGQPENNYKTTPPVLDSDGSFFLVSKLTVDKSRWQQGNVFSCSVMHEALHNRFTQKSLSLSPG

SEQ ID NO: 4932 - protein, 443 aa, synthetic construct
  REGION 1..443: note = 388D4-3_VK-x-CH1/Q38E/S183K/knob/PGLALA
DIVMTQTPLSSPVTLGQPASISCRSSQTIVHSDGNTYLEWYQERPGQPPRLLIYKVSNRFSGVPDRFSGSGAGTDFTLKISRVEAEDVGVYYCFQGSHVPLTFGQGTKVEIKSSASTKGPSVFPLAPSSKSTSGGTAALGCLVKDYFPEPVTVSWNSGALTSGVHTFPAVLQSSGLYSLKSVVTVPSSSLGTQTYICNVNHKPSNTKVDKKVEPKSCDKTHTCPPCPAPEAAGGPSVFLFPPKPKDTLMISRTPEVTCVVVDVSHEDPEVKFNWYVDGVEVHNAKTKPREEQYNSTYRVVSVLTVLHQDWLNGKEYKCKVSNKALGAPIEKTISKAKGQPREPQVYTLPPCRDELTKNQVSLWCLVKGFYPSDIAVEWESNGQPENNYKTTPPVLDSDGSFFLYSKLTVDKSRWQQGNVFSCSVMHEALHNHYTQKSLSLSPG

SEQ ID NO: 4933 - protein, 443 aa, synthetic construct
  REGION 1..443: note = 388D4-3_VK-x-CH1/Q38K/S183K/knob/PGLALA
DIVMTQTPLSSPVTLGQPASISCRSSQTIVHSDGNTYLEWYQKRPGQPPRLLIYKVSNRFSGVPDRFSGSGAGTDFTLKISRVEAEDVGVYYCFQGSHVPLTFGQGTKVEIKSSASTKGPSVFPLAPSSKSTSGGTAALGCLVKDYFPEPVTVSWNSGALTSGVHTFPAVLQSSGLYSLKSVVTVPSSSLGTQTYICNVNHKPSNTKVDKKVEPKSCDKTHTCPPCPAPEAAGGPSVFLFPPKPKDTLMISRTPEVTCVVVDVSHEDPEVKFNWYVDGVEVHNAKTKPREEQYNSTYRVVSVLTVLHQDWLNGKEYKCKVSNKALGAPIEKTISKAKGQPREPQVYTLPPCRDELTKNQVSLWCLVKGFYPSDIAVEWESNGQPENNYKTTPPVLDSDGSFFLYSKLTVDKSRWQQGNVFSCSVMHEALHNHYTQKSLSLSPG

SEQ ID NO: 4934 - protein, 439 aa, synthetic construct
  REGION 1..439: note = 244C8-2_VK-x-CH1/Q38E/S183K/knob/PGLALA
DIVLTQSPGTLSLSPGEKVTLSCRASSSVSSNYLYWYQEKPGQAPRLVIYSTSNLATGIPDRFSGSGSGTDYTLTISRLEPEDFAVYFCHQWSSYPPTFGQGTKVEIKSSASTKGPSVFPLAPSSKSTSGGTAALGCLVKDYFPEPVTVSWNSGALTSGVHTFPAVLQSSGLYSLKSVVTVPSSSLGTQTYICNVNHKPSNTKVDKKVEPKSCDKTHTCPPCPAPEAAGGPSVFLFPPKPKDTLMISRTPEVTCVVVDVSHEDPEVKFNWYVDGVEVHNAKTKPREEQYNSTYRVVSVLTVLHQDWLNGKEYKCKVSNKALGAPIEKTISKAKGQPREPQVYTLPPCRDELTKNQVSLWCLVKGFYPSDIAVEWESNGQPENNYKTTPPVLDSDGSFFLYSKLTVDKSRWQQGNVFSCSVMHEALHNHYTQKSLSLSPG

SEQ ID NO: 4935 - protein, 439 aa, synthetic construct
  REGION 1..439: note = 244C8-2_VK-x-CH1/Q38K/S183K/knob/PGLALA
DIVLTQSPGTLSLSPGEKVTLSCRASSSVSSNYLYWYQKKPGQAPRLVIYSTSNLATGIPDRFSGSGSGTDYTLTISRLEPEDFAVYFCHQWSSYPPTFGQGTKVEIKSSASTKGPSVFPLAPSSKSTSGGTAALGCLVKDYFPEPVTVSWNSGALTSGVHTFPAVLQSSGLYSLKSVVTVPSSSLGTQTYICNVNHKPSNTKVDKKVEPKSCDKTHTCPPCPAPEAAGGPSVFLFPPKPKDTLMISRTPEVTCVVVDVSHEDPEVKFNWYVDGVEVHNAKTKPREEQYNSTYRVVSVLTVLHQDWLNGKEYKCKVSNKALGAPIEKTISKAKGQPREPQVYTLPPCRDELTKNQVSLWCLVKGFYPSDIAVEWESNGQPENNYKTTPPVLDSDGSFFLYSKLTVDKSRWQQGNVFSCSVMHEALHNHYTQKSLSLSPG

SEQ ID NO: 4936 - protein, 605 aa, synthetic construct
  REGION 1..605: note = 244C8-2_VH-CH1/Q39K/S183E/CLD201/hole/PGLALA/RF
QVQLVQSGAEVKKPGASVKVSCKASGYTFTSYWMHWVRKAPGQGLEWMGMIDPSNSETSLNQKFQGRVTMTVDKSTNTVYMELSSLRSEDTAVYYCARSRGNYAYEMDYWGQGTLVTVSSASTKGPSVFPLAPSSKSTSGGTAALGCLVKDYFPEPVTVSWNSGALTSGVHTFPAVLQSSGLYSLESVVTVPSSSLGTQTYICNVNHKPSNTKVDKKVEPKSCTDWSPYADQSIKVRISLKSALGDKAYEWNDNEMYLFRSSVAYAMRQYFLKVKNQMILFGEEDVRVANLKPRISFNFFVTAPKNVSDIIPRTEVEKAIRMSRSRINDAFRLNDNSLEFLGIQPTLGPPNQPPVSTSTSPTRSMAPGAVHLPQPVSTRDKTHTCPPCPAPEAAGGPSVFLFPPKPKDTLMISRTPEVTCVVVDVSHEDPEVKFNWYVDGVEVHNAKTKPREEQYNSTYRVVSVLTVLHQDWLNGKEYKCKVSNKALGAPIEKTISKAKGQPREPQVCTLPPSRDELTKNQVSLSCAVKGFYPSDIAVEWESNGQPENNYKTTPPVLDSDGSFFLVSKLTVDKSRWQQGNVFSCSVMHEALHNRFTQKSLSLSPG

SEQ ID NO: 4937 - protein, 605 aa, synthetic construct
  REGION 1..605: note = 244C8-2_VH-CH1/Q39E/S183E/CLD201/hole/PGLALA/RF
QVQLVQSGAEVKKPGASVKVSCKASGYTFTSYWMHWVREAPGQGLEWMGMIDPSNSETSLNQKFQGRVTMTVDKSTNTVYMELSSLRSEDTAVYYCARSRGNYAYEMDYWGQGTLVTVSSASTKGPSVFPLAPSSKSTSGGTAALGCLVKDYFPEPVTVSWNSGALTSGVHTFPAVLQSSGLYSLESVVTVPSSSLGTQTYICNVNHKPSNTKVDKKVEPKSCTDWSPYADQSIKVRISLKSALGDKAYEWNDNEMYLFRSSVAYAMRQYFLKVKNQMILFGEEDVRVANLKPRISFNFFVTAPKNVSDIIPRTEVEKAIRMSRSRINDAFRLNDNSLEFLGIQPTLGPPNQPPVSTSTSPTRSMAPGAVHLPQPVSTRDKTHTCPPCPAPEAAGGPSVFLFPPKPKDTLMISRTPEVTCVVVDVSHEDPEVKFNWYVDGVEVHNAKTKPREEQYNSTYRVVSVLTVLHQDWLNGKEYKCKVSNKALGAPIEKTISKAKGQPREPQVCTLPPSRDELTKNQVSLSCAVKGFYPSDIAVEWESNGQPENNYKTTPPVLDSDGSFFLVSKLTVDKSRWQQGNVFSCSVMHEALHNRFTQKSLSLSPG

SEQ ID NO: 4938 - protein, 218 aa, synthetic construct
  REGION 1..218: note = Pe_VK-CK/Q38E/V133K
EIVLTQSPATLSLSPGERATLSCRASKGVSTSGYSYLHWYQEKPGQAPRLLIYLASYLESGVPARFSGSGSGTDFTLTISSLEPEDFAVYYCQHSRDLPLTFGGGTKVEIKRTVAAPSVFIFPPSDEQLKSGTASVKCLLNNFYPREAKVQWKVDNALQSGNSQESVTEQDSKDSTYSLSSTLTLSKADYEKHKVYACEVTHQGLSSPVTKSFNRGEC

SEQ ID NO: 4939 - protein, 225 aa, synthetic construct
  REGION 1..225: note = Ip_VH-x-CK/N84S/Q39K/V133E
QVQLVESGGGVVQPGRSLRLSCAASGFTFSSYTMHWVRKAPGKGLEWVTFISYDGNNKYYADSVKGRFTISRDNSKNTLYLQMSSLRAEDTAIYYCARTGWLGPFDYWGQGTLVTVSSASVAAPSVFIFPPSDEQLKSGTASVECLLNNFYPREAKVQWKVDNALQSGNSQESVTEQDSKDSTYSLSSTLTLSKADYEKHKVYACEVTHQGLSSPVTKSFNRGEC

SEQ ID NO: 4940 - protein, 225 aa, synthetic construct
  REGION 1..225: note = Ip_VH-x-CK/N84S/Q39E/V133E
QVQLVESGGGVVQPGRSLRLSCAASGFTFSSYTMHWVREAPGKGLEWVTFISYDGNNKYYADSVKGRFTISRDNSKNTLYLQMSSLRAEDTAIYYCARTGWLGPFDYWGQGTLVTVSSASVAAPSVFIFPPSDEQLKSGTASVECLLNNFYPREAKVQWKVDNALQSGNSQESVTEQDSKDSTYSLSSTLTLSKADYEKHKVYACEVTHQGLSSPVTKSFNRGEC

SEQ ID NO: 4941 - protein, 218 aa, synthetic construct
  REGION 1..218: note = Pe_VK-CK/Q38K/V133K
EIVLTQSPATLSLSPGERATLSCRASKGVSTSGYSYLHWYQKKPGQAPRLLIYLASYLESGVPARFSGSGSGTDFTLTISSLEPEDFAVYYCQHSRDLPLTFGGGTKVEIKRTVAAPSVFIFPPSDEQLKSGTASVKCLLNNFYPREAKVQWKVDNALQSGNSQESVTEQDSKDSTYSLSSTLTLSKADYEKHKVYACEVTHQGLSSPVTKSFNRGEC

SEQ ID NO: 4942 - protein, 215 aa, synthetic construct
  REGION 1..215: note = Ip_VK-CK/Q38E/V133K
EIVLTQSPGTLSLSPGERATLSCRASQSVGSSYLAWYQEKPGQAPRLLIYGAFSRATGIPDRFSGSGSGTDFTLTISRLEPEDFAVYYCQQYGSSPWTFGQGTKVEIKRTVAAPSVFIFPPSDEQLKSGTASVKCLLNNFYPREAKVQWKVDNALQSGNSQESVTEQDSKDSTYSLSSTLTLSKADYEKHKVYACEVTHQGLSSPVTKSFNRGEC

SEQ ID NO: 4943 - protein, 227 aa, synthetic construct
  REGION 1..227: note = Pe_VH-x-CK/Q39K/V133E
QVQLVQSGVEVKKPGASVKVSCKASGYTFTNYYMYWVRKAPGQGLEWMGGINPSNGGTNFNEKFKNRVTLTTDSSTTTAYMELKSLQFDDTAVYYCARRDYRFDMGFDYWGQGTLVTVSSASVAAPSVFIFPPSDEQLKSGTASVECLLNNFYPREAKVQWKVDNALQSGNSQESVTEQDSKDSTYSLSSTLTLSKADYEKHKVYACEVTHQGLSSPVTKSFNRGEC

SEQ ID NO: 4944 - protein, 227 aa, synthetic construct
  REGION 1..227: note = Pe_VH-x-CK/Q39E/V133E
QVQLVQSGVEVKKPGASVKVSCKASGYTFTNYYMYWVREAPGQGLEWMGGINPSNGGTNFNEKFKNRVTLTTDSSTTTAYMELKSLQFDDTAVYYCARRDYRFDMGFDYWGQGTLVTVSSASVAAPSVFIFPPSDEQLKSGTASVECLLNNFYPREAKVQWKVDNALQSGNSQESVTEQDSKDSTYSLSSTLTLSKADYEKHKVYACEVTHQGLSSPVTKSFNRGEC

SEQ ID NO: 4945 - protein, 215 aa, synthetic construct
  REGION 1..215: note = Ip_VK-CK/Q38K/V133K
EIVLTQSPGTLSLSPGERATLSCRASQSVGSSYLAWYQKKPGQAPRLLIYGAFSRATGIPDRFSGSGSGTDFTLTISRLEPEDFAVYYCQQYGSSPWTFGQGTKVEIKRTVAAPSVFIFPPSDEQLKSGTASVKCLLNNFYPREAKVQWKVDNALQSGNSQESVTEQDSKDSTYSLSSTLTLSKADYEKHKVYACEVTHQGLSSPVTKSFNRGEC

SEQ ID NO: 4946 - protein, 219 aa, synthetic construct
  REGION 1..219: note = 388D4-3_VK-CK/Q38E/V133K
DIVMTQTPLSSPVTLGQPASISCRSSQTIVHSDGNTYLEWYQERPGQPPRLLIYKVSNRFSGVPDRFSGSGAGTDFTLKISRVEAEDVGVYYCFQGSHVPLTFGQGTKLEIKRTVAAPSVFIFPPSDEQLKSGTASVKCLLNNFYPREAKVQWKVDNALQSGNSQESVTEQDSKDSTYSLSSTLTLSKADYEKHKVYACEVTHQGLSSPVTKSFNRGEC

SEQ ID NO: 4947 - protein, 219 aa, synthetic construct
  REGION 1..219: note = 388D4-3_VK-CK/Q38K/V133K
DIVMTQTPLSSPVTLGQPASISCRSSQTIVHSDGNTYLEWYQKRPGQPPRLLIYKVSNRFSGVPDRFSGSGAGTDFTLKISRVEAEDVGVYYCFQGSHVPLTFGQGTKLEIKRTVAAPSVFIFPPSDEQLKSGTASVKCLLNNFYPREAKVQWKVDNALQSGNSQESVTEQDSKDSTYSLSSTLTLSKADYEKHKVYACEVTHQGLSSPVTKSFNRGEC

SEQ ID NO: 4948 - protein, 227 aa, synthetic construct
  REGION 1..227: note = 388D4-3_VH-x-CK/Q39K/V133E
EVQLVQSGAEVKKPGASVKVSCKASGYTFTDYEMHWVRKAPGQGLEWMGIIDPGTGGTAYNQKFQGRVTMTADKSTSTVYMELSSLRSEDTAVYYCTSEKFGSNYYFDYWGQGTLVTVSSASVAAPSVFIFPPSDEQLKSGTASVECLLNNFYPREAKVQWKVDNALQSGNSQESVTEQDSKDSTYSLSSTLTLSKADYEKHKVYACEVTHQGLSSPVTKSFNRGEC

SEQ ID NO: 4949 - protein, 227 aa, synthetic construct
  REGION 1..227: note = 388D4-3_VH-x-CK/Q39E/V133E
EVQLVQSGAEVKKPGASVKVSCKASGYTFTDYEMHWVREAPGQGLEWMGIIDPGTGGTAYNQKFQGRVTMTADKSTSTVYMELSSLRSEDTAVYYCTSEKFGSNYYFDYWGQGTLVTVSSASVAAPSVFIFPPSDEQLKSGTASVECLLNNFYPREAKVQWKVDNALQSGNSQESVTEQDSKDSTYSLSSTLTLSKADYEKHKVYACEVTHQGLSSPVTKSFNRGEC

SEQ ID NO: 4950 - protein, 227 aa, synthetic construct
  REGION 1..227: note = 244C8-2_VH-x-CK/Q39K/V133E
QVQLVQSGAEVKKPGASVKVSCKASGYTFTSYWMHWVRKAPGQGLEWMGMIDPSNSETSLNQKFQGRVTMTVDKSTNTVYMELSSLRSEDTAVYYCARSRGNYAYEMDYWGQGTLVTVSSASVAAPSVFIFPPSDEQLKSGTASVECLLNNFYPREAKVQWKVDNALQSGNSQESVTEQDSKDSTYSLSSTLTLSKADYEKHKVYACEVTHQGLSSPVTKSFNRGEC

SEQ ID NO: 4951 - protein, 227 aa, synthetic construct
  REGION 1..227: note = 244C8-2_VH-x-CK/Q39E/V133E
QVQLVQSGAEVKKPGASVKVSCKASGYTFTSYWMHWVREAPGQGLEWMGMIDPSNSETSLNQKFQGRVTMTVDKSTNTVYMELSSLRSEDTAVYYCARSRGNYAYEMDYWGQGTLVTVSSASVAAPSVFIFPPSDEQLKSGTASVECLLNNFYPREAKVQWKVDNALQSGNSQESVTEQDSKDSTYSLSSTLTLSKADYEKHKVYACEVTHQGLSSPVTKSFNRGEC

SEQ ID NO: 4952 - protein, 215 aa, synthetic construct
  REGION 1..215: note = 244C8-2_VK-CK/Q38E/V133K
DIVLTQSPGTLSLSPGEKVTLSCRASSSVSSNYLYWYQEKPGQAPRLVIYSTSNLATGIPDRFSGSGSGTDYTLTISRLEPEDFAVYFCHQWSSYPPTFGQGTKVEIKRTVAAPSVFIFPPSDEQLKSGTASVKCLLNNFYPREAKVQWKVDNALQSGNSQESVTEQDSKDSTYSLSSTLTLSKADYEKHKVYACEVTHQGLSSPVTKSFNRGEC

SEQ ID NO: 4953 - protein, 215 aa, synthetic construct
  REGION 1..215: note = 244C8-2_VK-CK/Q38K/V133K
DIVLTQSPGTLSLSPGEKVTLSCRASSSVSSNYLYWYQKKPGQAPRLVIYSTSNLATGIPDRFSGSGSGTDYTLTISRLEPEDFAVYFCHQWSSYPPTFGQGTKVEIKRTVAAPSVFIFPPSDEQLKSGTASVKCLLNNFYPREAKVQWKVDNALQSGNSQESVTEQDSKDSTYSLSSTLTLSKADYEKHKVYACEVTHQGLSSPVTKSFNRGEC

SEQ ID NO: 4954 - protein, 221 aa, synthetic construct; identical to SEQ ID NO: 706
  REGION 1..221: note = Fc6/knob/PGLALA

SEQ ID NO: 4955 - protein, 605 aa, synthetic construct; identical to SEQ ID NO: 4920
  REGION 1..605: note = Pe_VH-CH1/Q39K/S183E/CLD201/hole/PGLALA

SEQ ID NO: 4956 - protein, 438 aa, synthetic construct
  REGION 1..438: note = At_VK-x-CH1/Q38E/S183K/knob/PGLALA
DIQMTQSPSSLSASVGDRVTITCRASQDVSTAVAWYQEKPGKAPKLLIYSASFLYSGVPSRFSGSGSGTDFTLTISSLQPEDFATYYCQQYLYHPATFGQGTKVEIKSSASTKGPSVFPLAPSSKSTSGGTAALGCLVKDYFPEPVTVSWNSGALTSGVHTFPAVLQSSGLYSLKSVVTVPSSSLGTQTYICNVNHKPSNTKVDKKVEPKSCDKTHTCPPCPAPEAAGGPSVFLFPPKPKDTLMISRTPEVTCVVVDVSHEDPEVKFNWYVDGVEVHNAKTKPREEQYNSTYRVVSVLTVLHQDWLNGKEYKCKVSNKALGAPIEKTISKAKGQPREPQVYTLPPCRDELTKNQVSLWCLVKGFYPSDIAVEWESNGQPENNYKTTPPVLDSDGSFFLYSKLTVDKSRWQQGNVFSCSVMHEALHNHYTQKSLSLSPG

SEQ ID NO: 4957 - protein, 438 aa, synthetic construct
  REGION 1..438: note = At_VK-x-CH1/Q38K/S183K/knob/PGLALA
DIQMTQSPSSLSASVGDRVTITCRASQDVSTAVAWYQKKPGKAPKLLIYSASFLYSGVPSRFSGSGSGTDFTLTISSLQPEDFATYYCQQYLYHPATFGQGTKVEIKSSASTKGPSVFPLAPSSKSTSGGTAALGCLVKDYFPEPVTVSWNSGALTSGVHTFPAVLQSSGLYSLKSVVTVPSSSLGTQTYICNVNHKPSNTKVDKKVEPKSCDKTHTCPPCPAPEAAGGPSVFLFPPKPKDTLMISRTPEVTCVVVDVSHEDPEVKFNWYVDGVEVHNAKTKPREEQYNSTYRVVSVLTVLHQDWLNGKEYKCKVSNKALGAPIEKTISKAKGQPREPQVYTLPPCRDELTKNQVSLWCLVKGFYPSDIAVEWESNGQPENNYKTTPPVLDSDGSFFLYSKLTVDKSRWQQGNVFSCSVMHEALHNHYTQKSLSLSPG

SEQ ID NO: 4958 - protein, 605 aa, synthetic construct; identical to SEQ ID NO: 4923
  REGION 1..605: note = Pe_VH-CH1/Q39E/S183E/CLD201/hole/PGLALA/RF

SEQ ID NO: 4959 - protein, 603 aa, synthetic construct
  REGION 1..603: note = At_VH-CH1/N84S/Q39K/S183E/CLD201/hole/PGLALA/RF
EVQLVESGGGLVQPGGSLRLSCAASGFTFSDSWIHWVRKAPGKGLEWVAWISPYGGSTYYADSVKGRFTISADTSKNTAYLQMSSLRAEDTAVYYCARRHWPGGFDYWGQGTLVTVSSASTKGPSVFPLAPSSKSTSGGTAALGCLVKDYFPEPVTVSWNSGALTSGVHTFPAVLQSSGLYSLESVVTVPSSSLGTQTYICNVNHKPSNTKVDKKVEPKSCTDWSPYADQSIKVRISLKSALGDKAYEWNDNEMYLFRSSVAYAMRQYFLKVKNQMILFGEEDVRVANLKPRISFNFFVTAPKNVSDIIPRTEVEKAIRMSRSRINDAFRLNDNSLEFLGIQPTLGPPNQPPVSTSTSPTRSMAPGAVHLPQPVSTRDKTHTCPPCPAPEAAGGPSVFLFPPKPKDTLMISRTPEVTCVVVDVSHEDPEVKFNWYVDGVEVHNAKTKPREEQYNSTYRVVSVLTVLHQDWLNGKEYKCKVSNKALGAPIEKTISKAKGQPREPQVCTLPPSRDELTKNQVSLSCAVKGFYPSDIAVEWESNGQPENNYKTTPPVLDSDGSFFLVSKLTVDKSRWQQGNVFSCSVMHEALHNRFTQKSLSLSPG

SEQ ID NO: 4960 - protein, 442 aa, synthetic construct; identical to SEQ ID NO: 4927
  REGION 1..442: note = Pe_VK-x-CH1/Q38E/S183K/knob/PGLALA

SEQ ID NO: 4961 - protein, 442 aa, synthetic construct; identical to SEQ ID NO: 4928
  REGION 1..442: note = Pe_VK-x-CH1/Q38K/S183K/knob/PGLALA

SEQ ID NO: 4962 - protein, 603 aa, synthetic construct
  REGION 1..603: note = At_VH-CH1/N84S/Q39E/S183E/CLD201/hole/PGLALA/RF
EVQLVESGGGLVQPGGSLRLSCAASGFTFSDSWIHWVREAPGKGLEWVAWISPYGGSTYYADSVKGRFTISADTSKNTAYLQMSSLRAEDTAVYYCARRHWPGGFDYWGQGTLVTVSSASTKGPSVFPLAPSSKSTSGGTAALGCLVKDYFPEPVTVSWNSGALTSGVHTFPAVLQSSGLYSLESVVTVPSSSLGTQTYICNVNHKPSNTKVDKKVEPKSCTDWSPYADQSIKVRISLKSALGDKAYEWNDNEMYLFRSSVAYAMRQYFLKVKNQMILFGEEDVRVANLKPRISFNFFVTAPKNVSDIIPRTEVEKAIRMSRSRINDAFRLNDNSLEFLGIQPTLGPPNQPPVSTSTSPTRSMAPGAVHLPQPVSTRDKTHTCPPCPAPEAAGGPSVFLFPPKPKDTLMISRTPEVTCVVVDVSHEDPEVKFNWYVDGVEVHNAKTKPREEQYNSTYRVVSVLTVLHQDWLNGKEYKCKVSNKALGAPIEKTISKAKGQPREPQVCTLPPSRDELTKNQVSLSCAVKGFYPSDIAVEWESNGQPENNYKTTPPVLDSDGSFFLVSKLTVDKSRWQQGNVFSCSVMHEALHNRFTQKSLSLSPG

SEQ ID NO: 4963 - protein, 605 aa, synthetic construct; identical to SEQ ID NO: 4930
  REGION 1..605: note = 388D4-3_VH-CH1/Q39K/S183E/CLD201/hole/PGLALA/RF

SEQ ID NO: 4964 - protein, 605 aa, synthetic construct; identical to SEQ ID NO: 4931
  REGION 1..605: note = 388D4-3_VH-CH1/Q39E/S183E/CLD201/hole/PGLALA/RF

SEQ ID NO: 4965 - protein, 443 aa, synthetic construct; identical to SEQ ID NO: 4932
  REGION 1..443: note = 388D4-3_VK-x-CH1/Q38E/S183K/knob/PGLALA

SEQ ID NO: 4966 - protein, 443 aa, synthetic construct; identical to SEQ ID NO: 4933
  REGION 1..443: note = 388D4-3_VK-x-CH1/Q38K/S183K/knob/PGLALA

SEQ ID NO: 4967 - protein, 438 aa, synthetic construct
  REGION 1..438: note = B60-55_VK-x-CH1/Q38E/S183K/knob/PGLALA
EIVMTQSPATLSLSPGERATLSCRASQSVGIHLAWYQEKLGQAPRLLIYGASSRATGIPDRFSGSGSGTDFTLTISRLEPEDFAVYYCQQYGSLPRTFGQGTKVEIKSSASTKGPSVFPLAPSSKSTSGGTAALGCLVKDYFPEPVTVSWNSGALTSGVHTFPAVLQSSGLYSLKSVVTVPSSSLGTQTYICNVNHKPSNTKVDKKVEPKSCDKTHTCPPCPAPEAAGGPSVFLFPPKPKDTLMISRTPEVTCVVVDVSHEDPEVKFNWYVDGVEVHNAKTKPREEQYNSTYRVVSVLTVLHQDWLNGKEYKCKVSNKALGAPIEKTISKAKGQPREPQVYTLPPCRDELTKNQVSLWCLVKGFYPSDIAVEWESNGQPENNYKTTPPVLDSDGSFFLYSKLTVDKSRWQQGNVFSCSVMHEALHNHYTQKSLSLSPG

SEQ ID NO: 4968 - protein, 438 aa, synthetic construct
  REGION 1..438: note = B60-55_VK-x-CH1/Q38K/S183K/knob/PGLALA
EIVMTQSPATLSLSPGERATLSCRASQSVGIHLAWYQKKLGQAPRLLIYGASSRATGIPDRFSGSGSGTDFTLTISRLEPEDFAVYYCQQYGSLPRTFGQGTKVEIKSSASTKGPSVFPLAPSSKSTSGGTAALGCLVKDYFPEPVTVSWNSGALTSGVHTFPAVLQSSGLYSLKSVVTVPSSSLGTQTYICNVNHKPSNTKVDKKVEPKSCDKTHTCPPCPAPEAAGGPSVFLFPPKPKDTLMISRTPEVTCVVVDVSHEDPEVKFNWYVDGVEVHNAKTKPREEQYNSTYRVVSVLTVLHQDWLNGKEYKCKVSNKALGAPIEKTISKAKGQPREPQVYTLPPCRDELTKNQVSLWCLVKGFYPSDIAVEWESNGQPENNYKTTPPVLDSDGSFFLYSKLTVDKSRWQQGNVFSCSVMHEALHNHYTQKSLSLSPG

SEQ ID NO: 4969 - protein, 605 aa, synthetic construct
  REGION 1..605: note = B60-55_VH-CH1/Q39K/S183E/CLD201/hole/PGLALA/RF
QVQLVQSGAEVKKPASSVKVSCTASGGSFSTYAISWVRKAPGQGLEWMGGIIPIFGTTKYAQRFQGRVTITADESTTTAYMELSSLISDDTALYYCTTSRGFNYGWFDYWGQGTLVTVSSASTKGPSVFPLAPSSKSTSGGTAALGCLVKDYFPEPVTVSWNSGALTSGVHTFPAVLQSSGLYSLESVVTVPSSSLGTQTYICNVNHKPSNTKVDKKVEPKSCTDWSPYADQSIKVRISLKSALGDKAYEWNDNEMYLFRSSVAYAMRQYFLKVKNQMILFGEEDVRVANLKPRISFNFFVTAPKNVSDIIPRTEVEKAIRMSRSRINDAFRLNDNSLEFLGIQPTLGPPNQPPVSTSTSPTRSMAPGAVHLPQPVSTRDKTHTCPPCPAPEAAGGPSVFLFPPKPKDTLMISRTPEVTCVVVDVSHEDPEVKFNWYVDGVEVHNAKTKPREEQYNSTYRVVSVLTVLHQDWLNGKEYKCKVSNKALGAPIEKTISKAKGQPREPQVCTLPPSRDELTKNQVSLSCAVKGFYPSDIAVEWESNGQPENNYKTTPPVLDSDGSFFLVSKLTVDKSRWQQGNVFSCSVMHEALHNRFTQKSLSLSPG

SEQ ID NO: 4970 - protein, 605 aa, synthetic construct
  REGION 1..605: note = B60-55_VH-CH1/Q39E/S183E/CLD201/hole/PGLALA/RF
QVQLVQSGAEVKKPASSVKVSCTASGGSFSTYAISWVREAPGQGLEWMGGIIPIFGTTKYAQRFQGRVTITADESTTTAYMELSSLISDDTALYYCTTSRGFNYGWFDYWGQGTLVTVSSASTKGPSVFPLAPSSKSTSGGTAALGCLVKDYFPEPVTVSWNSGALTSGVHTFPAVLQSSGLYSLESVVTVPSSSLGTQTYICNVNHKPSNTKVDKKVEPKSCTDWSPYADQSIKVRISLKSALGDKAYEWNDNEMYLFRSSVAYAMRQYFLKVKNQMILFGEEDVRVANLKPRISFNFFVTAPKNVSDIIPRTEVEKAIRMSRSRINDAFRLNDNSLEFLGIQPTLGPPNQPPVSTSTSPTRSMAPGAVHLPQPVSTRDKTHTCPPCPAPEAAGGPSVFLFPPKPKDTLMISRTPEVTCVVVDVSHEDPEVKFNWYVDGVEVHNAKTKPREEQYNSTYRVVSVLTVLHQDWLNGKEYKCKVSNKALGAPIEKTISKAKGQPREPQVCTLPPSRDELTKNQVSLSCAVKGFYPSDIAVEWESNGQPENNYKTTPPVLDSDGSFFLVSKLTVDKSRWQQGNVFSCSVMHEALHNRFTQKSLSLSPG

SEQ ID NO: 4971 - protein, 218 aa, synthetic construct; identical to SEQ ID NO: 4938
  REGION 1..218: note = Pe_VK-CK/Q38E/V133K

SEQ ID NO: 4972 - protein, 225 aa, synthetic construct
  REGION 1..225: note = At_VH-x-CK/N84S/Q39K/V133E
EVQLVESGGGLVQPGGSLRLSCAASGFTFSDSWIHWVRKAPGKGLEWVAWISPYGGSTYYADSVKGRFTISADTSKNTAYLQMSSLRAEDTAVYYCARRHWPGGFDYWGQGTLVTVSSASVAAPSVFIFPPSDEQLKSGTASVECLLNNFYPREAKVQWKVDNALQSGNSQESVTEQDSKDSTYSLSSTLTLSKADYEKHKVYACEVTHQGLSSPVTKSFNRGEC

SEQ ID NO: 4973 - protein, 225 aa, synthetic construct
  REGION 1..225: note = At_VH-x-CK/N84S/Q39E/V133E
EVQLVESGGGLVQPGGSLRLSCAASGFTFSDSWIHWVREAPGKGLEWVAWISPYGGSTYYADSVKGRFTISADTSKNTAYLQMSSLRAEDTAVYYCARRHWPGGFDYWGQGTLVTVSSASVAAPSVFIFPPSDEQLKSGTASVECLLNNFYPREAKVQWKVDNALQSGNSQESVTEQDSKDSTYSLSSTLTLSKADYEKHKVYACEVTHQGLSSPVTKSFNRGEC

SEQ ID NO: 4974 - protein, 218 aa, synthetic construct; identical to SEQ ID NO: 4941
  REGION 1..218: note = Pe_VK-CK/Q38K/V133K

SEQ ID NO: 4975 - protein, 214 aa, synthetic construct
  REGION 1..214: note = At_VK-CK/Q38E/V133K
DIQMTQSPSSLSASVGDRVTITCRASQDVSTAVAWYQEKPGKAPKLLIYSASFLYSGVPSRFSGSGSGTDFTLTISSLQPEDFATYYCQQYLYHPATFGQGTKVEIKRTVAAPSVFIFPPSDEQLKSGTASVKCLLNNFYPREAKVQWKVDNALQSGNSQESVTEQDSKDSTYSLSSTLTLSKADYEKHKVYACEVTHQGLSSPVTKSFNRGEC

SEQ ID NO: 4976 - protein, 227 aa, synthetic construct; identical to SEQ ID NO: 4943
  REGION 1..227: note = Pe_VH-x-CK/Q39K/V133E

SEQ ID NO: 4977 - protein, 227 aa, synthetic construct; identical to SEQ ID NO: 4944
  REGION 1..227: note = Pe_VH-x-CK/Q39E/V133E

SEQ ID NO: 4978 - protein, 214 aa, synthetic construct
  REGION 1..214: note = At_VK-CK/Q38K/V133K
DIQMTQSPSSLSASVGDRVTITCRASQDVSTAVAWYQKKPGKAPKLLIYSASFLYSGVPSRFSGSGSGTDFTLTISSLQPEDFATYYCQQYLYHPATFGQGTKVEIKRTVAAPSVFIFPPSDEQLKSGTASVKCLLNNFYPREAKVQWKVDNALQSGNSQESVTEQDSKDSTYSLSSTLTLSKADYEKHKVYACEVTHQGLSSPVTKSFNRGEC

SEQ ID NO: 4979 - protein, 219 aa, synthetic construct; identical to SEQ ID NO: 4946
  REGION 1..219: note = 388D4-3_VK-CK/Q38E/V133K

SEQ ID NO: 4980 - protein, 219 aa, synthetic construct; identical to SEQ ID NO: 4947
  REGION 1..219: note = 388D4-3_VK-CK/Q38K/V133K

SEQ ID NO: 4981 - protein, 227 aa, synthetic construct; identical to SEQ ID NO: 4948
  REGION 1..227: note = 388D4-3_VH-x-CK/Q39K/V133E

SEQ ID NO: 4982 - protein, 227 aa, synthetic construct; identical to SEQ ID NO: 4949
  REGION 1..227: note = 388D4-3_VH-x-CK/Q39E/V133E

SEQ ID NO: 4983 - protein, 227 aa, synthetic construct
  REGION 1..227: note = B60-55_VH-x-CK/Q39K/V133E
QVQLVQSGAEVKKPASSVKVSCTASGGSFSTYAISWVRKAPGQGLEWMGGIIPIFGTTKYAQRFQGRVTITADESTTTAYMELSSLISDDTALYYCTTSRGFNYGWFDYWGQGTLVTVSSASVAAPSVFIFPPSDEQLKSGTASVECLLNNFYPREAKVQWKVDNALQSGNSQESVTEQDSKDSTYSLSSTLTLSKADYEKHKVYACEVTHQGLSSPVTKSFNRGEC

SEQ ID NO: 4984 - protein, 227 aa, synthetic construct
  REGION 1..227: note = B60-55_VH-x-CK/Q39E/V133E
QVQLVQSGAEVKKPASSVKVSCTASGGSFSTYAISWVREAPGQGLEWMGGIIPIFGTTKYAQRFQGRVTITADESTTTAYMELSSLISDDTALYYCTTSRGFNYGWFDYWGQGTLVTVSSASVAAPSVFIFPPSDEQLKSGTASVECLLNNFYPREAKVQWKVDNALQSGNSQESVTEQDSKDSTYSLSSTLTLSKADYEKHKVYACEVTHQGLSSPVTKSFNRGEC

SEQ ID NO: 4985 - protein, 214 aa, synthetic construct
  REGION 1..214: note = B60-55_VK-CK/Q38E/V133K
EIVMTQSPATLSLSPGERATLSCRASQSVGIHLAWYQEKLGQAPRLLIYGASSRATGIPDRFSGSGSGTDFTLTISRLEPEDFAVYYCQQYGSLPRTFGQGTKVEIKRTVAAPSVFIFPPSDEQLKSGTASVKCLLNNFYPREAKVQWKVDNALQSGNSQESVTEQDSKDSTYSLSSTLTLSKADYEKHKVYACEVTHQGLSSPVTKSFNRGEC

SEQ ID NO: 4986 - protein, 214 aa, synthetic construct
  REGION 1..214: note = B60-55_VK-CK/Q38K/V133K
EIVMTQSPATLSLSPGERATLSCRASQSVGIHLAWYQKKLGQAPRLLIYGASSRATGIPDRFSGSGSGTDFTLTISRLEPEDFAVYYCQQYGSLPRTFGQGTKVEIKRTVAAPSVFIFPPSDEQLKSGTASVKCLLNNFYPREAKVQWKVDNALQSGNSQESVTEQDSKDSTYSLSSTLTLSKADYEKHKVYACEVTHQGLSSPVTKSFNRGEC

SEQ ID NO: 4987 - protein, 605 aa, synthetic construct
  REGION 1..605: note = Tr_VH-CH1/N84S/Q39K/S183E/CLD201/hole/RF
EVQLVESGGGLVQPGGSLRLSCAASGFNIKDTYIHWVRKAPGKGLEWVARIYPTNGYTRYADSVKGRFTISADTSKNTAYLQMSSLRAEDTAVYYCSRWGGDGFYAMDYWGQGTLVTVSSASTKGPSVFPLAPSSKSTSGGTAALGCLVKDYFPEPVTVSWNSGALTSGVHTFPAVLQSSGLYSLESVVTVPSSSLGTQTYICNVNHKPSNTKVDKKVEPKSCTDWSPYADQSIKVRISLKSALGDKAYEWNDNEMYLFRSSVAYAMRQYFLKVKNQMILFGEEDVRVANLKPRISFNFFVTAPKNVSDIIPRTEVEKAIRMSRSRINDAFRLNDNSLEFLGIQPTLGPPNQPPVSTSTSPTRSMAPGAVHLPQPVSTRDKTHTCPPCPAPELLGGPSVFLFPPKPKDTLMISRTPEVTCVVVDVSHEDPEVKFNWYVDGVEVHNAKTKPREEQYNSTYRVVSVLTVLHQDWLNGKEYKCKVSNKALPAPIEKTISKAKGQPREPQVCTLPPSRDELTKNQVSLSCAVKGFYPSDIAVEWESNGQPENNYKTTPPVLDSDGSFFLVSKLTVDKSRWQQGNVFSCSVMHEALHNRFTQKSLSLSPG

SEQ ID NO: 4988 - protein, 438 aa, synthetic construct
  REGION 1..438: note = Pt_VK-x-CH1/Q38E/S183K/knob
DIQMTQSPSSLSASVGDRVTITCKASQDVSIGVAWYQEKPGKAPKLLIYSASYRYTGVPSRFSGSGSGTDFTLTISSLQPEDFATYYCQQYYIYPYTFGQGTKVEIKSSASTKGPSVFPLAPSSKSTSGGTAALGCLVKDYFPEPVTVSWNSGALTSGVHTFPAVLQSSGLYSLKSVVTVPSSSLGTQTYICNVNHKPSNTKVDKKVEPKSCDKTHTCPPCPAPELLGGPSVFLFPPKPKDTLMISRTPEVTCVVVDVSHEDPEVKFNWYVDGVEVHNAKTKPREEQYNSTYRVVSVLTVLHQDWLNGKEYKCKVSNKALPAPIEKTISKAKGQPREPQVYTLPPCRDELTKNQVSLWCLVKGFYPSDIAVEWESNGQPENNYKTTPPVLDSDGSFFLYSKLTVDKSRWQQGNVFSCSVMHEALHNHYTQKSLSLSPG

SEQ ID NO: 4989 - protein, 438 aa, synthetic construct
  REGION 1..438: note = Pt_VK-x-CH1/Q38K/S183K/knob
DIQMTQSPSSLSASVGDRVTITCKASQDVSIGVAWYQKKPGKAPKLLIYSASYRYTGVPSRFSGSGSGTDFTLTISSLQPEDFATYYCQQYYIYPYTFGQGTKVEIKSSASTKGPSVFPLAPSSKSTSGGTAALGCLVKDYFPEPVTVSWNSGALTSGVHTFPAVLQSSGLYSLKSVVTVPSSSLGTQTYICNVNHKPSNTKVDKKVEPKSCDKTHTCPPCPAPELLGGPSVFLFPPKPKDTLMISRTPEVTCVVVDVSHEDPEVKFNWYVDGVEVHNAKTKPREEQYNSTYRVVSVLTVLHQDWLNGKEYKCKVSNKALPAPIEKTISKAKGQPREPQVYTLPPCRDELTKNQVSLWCLVKGFYPSDIAVEWESNGQPENNYKTTPPVLDSDGSFFLYSKLTVDKSRWQQGNVFSCSVMHEALHNHYTQKSLSLSPG

SEQ ID NO: 4990 - protein, 605 aa, synthetic construct
  REGION 1..605: note = Tr_VH-CH1/N84S/Q39E/S183E/CLD201/hole/RF
EVQLVESGGGLVQPGGSLRLSCAASGFNIKDTYIHWVREAPGKGLEWVARIYPTNGYTRYADSVKGRFTISADTSKNTAYLQMSSLRAEDTAVYYCSRWGGDGFYAMDYWGQGTLVTVSSASTKGPSVFPLAPSSKSTSGGTAALGCLVKDYFPEPVTVSWNSGALTSGVHTFPAVLQSSGLYSLESVVTVPSSSLGTQTYICNVNHKPSNTKVDKKVEPKSCTDWSPYADQSIKVRISLKSALGDKAYEWNDNEMYLFRSSVAYAMRQYFLKVKNQMILFGEEDVRVANLKPRISFNFFVTAPKNVSDIIPRTEVEKAIRMSRSRINDAFRLNDNSLEFLGIQPTLGPPNQPPVSTSTSPTRSMAPGAVHLPQPVSTRDKTHTCPPCPAPELLGGPSVFLFPPKPKDTLMISRTPEVTCVVVDVSHEDPEVKFNWYVDGVEVHNAKTKPREEQYNSTYRVVSVLTVLHQDWLNGKEYKCKVSNKALPAPIEKTISKAKGQPREPQVCTLPPSRDELTKNQVSLSCAVKGFYPSDIAVEWESNGQPENNYKTTPPVLDSDGSFFLVSKLTVDKSRWQQGNVFSCSVMHEALHNRFTQKSLSLSPG

SEQ ID NO: 4991 - protein, 604 aa, synthetic construct
  REGION 1..604: note = Pt_VH-CH1/N84S/Q39K/S183E/CLD201/hole/RF
EVQLVESGGGLVQPGGSLRLSCAASGFTFTDYTMDWVRKAPGKGLEWVADVNPNSGGSIYNQRFKGRFTLSVDRSKNTLYLQMSSLRAEDTAVYYCARNLGPSFYFDYWGQGTLVTVSSASTKGPSVFPLAPSSKSTSGGTAALGCLVKDYFPEPVTVSWNSGALTSGVHTFPAVLQSSGLYSLESVVTVPSSSLGTQTYICNVNHKPSNTKVDKKVEPKSCTDWSPYADQSIKVRISLKSALGDKAYEWNDNEMYLFRSSVAYAMRQYFLKVKNQMILFGEEDVRVANLKPRISFNFFVTAPKNVSDIIPRTEVEKAIRMSRSRINDAFRLNDNSLEFLGIQPTLGPPNQPPVSTSTSPTRSMAPGAVHLPQPVSTRDKTHTCPPCPAPELLGGPSVFLFPPKPKDTLMISRTPEVTCVVVDVSHEDPEVKFNWYVDGVEVHNAKTKPREEQYNSTYRVVSVLTVLHQDWLNGKEYKCKVSNKALPAPIEKTISKAKGQPREPQVCTLPPSRDELTKNQVSLSCAVKGFYPSDIAVEWESNGQPENNYKTTPPVLDSDGSFFLVSKLTVDKSRWQQGNVFSCSVMHEALHNRFTQKSLSLSPG

SEQ ID NO: 4992 - protein, 438 aa, synthetic construct
  REGION 1..438: note = Tr_VK-x-CH1/Q38E/S183K/knob
DIQMTQSPSSLSASVGDRVTITCRASQDVNTAVAWYQEKPGKAPKLLIYSASFLYSGVPSRFSGSRSGTDFTLTISSLQPEDFATYYCQQHYTTPPTFGQGTKVEIKSSASTKGPSVFPLAPSSKSTSGGTAALGCLVKDYFPEPVTVSWNSGALTSGVHTFPAVLQSSGLYSLKSVVTVPSSSLGTQTYICNVNHKPSNTKVDKKVEPKSCDKTHTCPPCPAPELLGGPSVFLFPPKPKDTLMISRTPEVTCVVVDVSHEDPEVKFNWYVDGVEVHNAKTKPREEQYNSTYRVVSVLTVLHQDWLNGKEYKCKVSNKALPAPIEKTISKAKGQPREPQVYTLPPCRDELTKNQVSLWCLVKGFYPSDIAVEWESNGQPENNYKTTPPVLDSDGSFFLYSKLTVDKSRWQQGNVFSCSVMHEALHNHYTQKSLSLSPG

SEQ ID NO: 4993 - protein, 438 aa, synthetic construct
  REGION 1..438: note = Tr_VK-x-CH1/Q38K/S183K/knob
DIQMTQSPSSLSASVGDRVTITCRASQDVNTAVAWYQKKPGKAPKLLIYSASFLYSGVPSRFSGSRSGTDFTLTISSLQPEDFATYYCQQHYTTPPTFGQGTKVEIKSSASTKGPSVFPLAPSSKSTSGGTAALGCLVKDYFPEPVTVSWNSGALTSGVHTFPAVLQSSGLYSLKSVVTVPSSSLGTQTYICNVNHKPSNTKVDKKVEPKSCDKTHTCPPCPAPELLGGPSVFLFPPKPKDTLMISRTPEVTCVVVDVSHEDPEVKFNWYVDGVEVHNAKTKPREEQYNSTYRVVSVLTVLHQDWLNGKEYKCKVSNKALPAPIEKTISKAKGQPREPQVYTLPPCRDELTKNQVSLWCLVKGFYPSDIAVEWESNGQPENNYKTTPPVLDSDGSFFLYSKLTVDKSRWQQGNVFSCSVMHEALHNHYTQKSLSLSPG

SEQ ID NO: 4994 - protein, 604 aa, synthetic construct
  REGION 1..604: note = Pt_VH-CH1/N84S/Q39E/S183E/CLD201/hole/RF
EVQLVESGGGLVQPGGSLRLSCAASGFTFTDYTMDWVREAPGKGLEWVADVNPNSGGSIYNQRFKGRFTLSVDRSKNTLYLQMSSLRAEDTAVYYCARNLGPSFYFDYWGQGTLVTVSSASTKGPSVFPLAPSSKSTSGGTAALGCLVKDYFPEPVTVSWNSGALTSGVHTFPAVLQSSGLYSLESVVTVPSSSLGTQTYICNVNHKPSNTKVDKKVEPKSCTDWSPYADQSIKVRISLKSALGDKAYEWNDNEMYLFRSSVAYAMRQYFLKVKNQMILFGEEDVRVANLKPRISFNFFVTAPKNVSDIIPRTEVEKAIRMSRSRINDAFRLNDNSLEFLGIQPTLGPPNQPPVSTSTSPTRSMAPGAVHLPQPVSTRDKTHTCPPCPAPELLGGPSVFLFPPKPKDTLMISRTPEVTCVVVDVSHEDPEVKFNWYVDGVEVHNAKTKPREEQYNSTYRVVSVLTVLHQDWLNGKEYKCKVSNKALPAPIEKTISKAKGQPREPQVCTLPPSRDELTKNQVSLSCAVKGFYPSDIAVEWESNGQPENNYKTTPPVLDSDGSFFLVSKLTVDKSRWQQGNVFSCSVMHEALHNRFTQKSLSLSPG

SEQ ID NO: 4995 - protein, 604 aa, synthetic construct
  REGION 1..604: note = Ce_VH-CH1/N84S/Q39K/S183E/CLD201/hole/RF
QVQLKQSGPGLVQPSQSLSITCTVSGFSLTNYGVHWVRKSPGKGLEWLGVIWSGGNTDYNTPFTSRLSINKDNSKSQVFFKMSSLQSNDTAIYYCARALTYYDYEFAYWGQGTLVTVSAASTKGPSVFPLAPSSKSTSGGTAALGCLVKDYFPEPVTVSWNSGALTSGVHTFPAVLQSSGLYSLESVVTVPSSSLGTQTYICNVNHKPSNTKVDKKVEPKSCTDWSPYADQSIKVRISLKSALGDKAYEWNDNEMYLFRSSVAYAMRQYFLKVKNQMILFGEEDVRVANLKPRISFNFFVTAPKNVSDIIPRTEVEKAIRMSRSRINDAFRLNDNSLEFLGIQPTLGPPNQPPVSTSTSPTRSMAPGAVHLPQPVSTRDKTHTCPPCPAPELLGGPSVFLFPPKPKDTLMISRTPEVTCVVVDVSHEDPEVKFNWYVDGVEVHNAKTKPREEQYNSTYRVVSVLTVLHQDWLNGKEYKCKVSNKALPAPIEKTISKAKGQPREPQVCTLPPSRDELTKNQVSLSCAVKGFYPSDIAVEWESNGQPENNYKTTPPVLDSDGSFFLVSKLTVDKSRWQQGNVFSCSVMHEALHNRFTQKSLSLSPG

SEQ ID NO: 4996 - protein, 604 aa, synthetic construct
  REGION 1..604: note = Ce_VH-CH1/N84S/Q39E/S183E/CLD201/hole/RF
QVQLKQSGPGLVQPSQSLSITCTVSGFSLTNYGVHWVRESPGKGLEWLGVIWSGGNTDYNTPFTSRLSINKDNSKSQVFFKMSSLQSNDTAIYYCARALTYYDYEFAYWGQGTLVTVSAASTKGPSVFPLAPSSKSTSGGTAALGCLVKDYFPEPVTVSWNSGALTSGVHTFPAVLQSSGLYSLESVVTVPSSSLGTQTYICNVNHKPSNTKVDKKVEPKSCTDWSPYADQSIKVRISLKSALGDKAYEWNDNEMYLFRSSVAYAMRQYFLKVKNQMILFGEEDVRVANLKPRISFNFFVTAPKNVSDIIPRTEVEKAIRMSRSRINDAFRLNDNSLEFLGIQPTLGPPNQPPVSTSTSPTRSMAPGAVHLPQPVSTRDKTHTCPPCPAPELLGGPSVFLFPPKPKDTLMISRTPEVTCVVVDVSHEDPEVKFNWYVDGVEVHNAKTKPREEQYNSTYRVVSVLTVLHQDWLNGKEYKCKVSNKALPAPIEKTISKAKGQPREPQVCTLPPSRDELTKNQVSLSCAVKGFYPSDIAVEWESNGQPENNYKTTPPVLDSDGSFFLVSKLTVDKSRWQQGNVFSCSVMHEALHNRFTQKSLSLSPG

SEQ ID NO: 4997 - protein, 438 aa, synthetic construct
  REGION 1..438: note = Ce_VK-x-CH1/Q38E/S183K/knob
DILLTQSPVILSVSPGERVSFSCRASQSIGTNIHWYQERTNGSPRLLIKYASESISGIPSRFSGSGSGTDFTLSINSVESEDIADYYCQQNNNWPTTFGAGTKVEIKSSASTKGPSVFPLAPSSKSTSGGTAALGCLVKDYFPEPVTVSWNSGALTSGVHTFPAVLQSSGLYSLKSVVTVPSSSLGTQTYICNVNHKPSNTKVDKKVEPKSCDKTHTCPPCPAPELLGGPSVFLFPPKPKDTLMISRTPEVTCVVVDVSHEDPEVKFNWYVDGVEVHNAKTKPREEQYNSTYRVVSVLTVLHQDWLNGKEYKCKVSNKALPAPIEKTISKAKGQPREPQVYTLPPCRDELTKNQVSLWCLVKGFYPSDIAVEWESNGQPENNYKTTPPVLDSDGSFFLYSKLTVDKSRWQQGNVFSCSVMHEALHNHYTQKSLSLSPG

SEQ ID NO: 4998 - protein, 438 aa, synthetic construct
  REGION 1..438: note = Ce_VK-x-CH1/Q38K/S183K/knob
DILLTQSPVILSVSPGERVSFSCRASQSIGTNIHWYQKRTNGSPRLLIKYASESISGIPSRFSGSGSGTDFTLSINSVESEDIADYYCQQNNNWPTTFGAGTKVEIKSSASTKGPSVFPLAPSSKSTSGGTAALGCLVKDYFPEPVTVSWNSGALTSGVHTFPAVLQSSGLYSLKSVVTVPSSSLGTQTYICNVNHKPSNTKVDKKVEPKSCDKTHTCPPCPAPELLGGPSVFLFPPKPKDTLMISRTPEVTCVVVDVSHEDPEVKFNWYVDGVEVHNAKTKPREEQYNSTYRVVSVLTVLHQDWLNGKEYKCKVSNKALPAPIEKTISKAKGQPREPQVYTLPPCRDELTKNQVSLWCLVKGFYPSDIAVEWESNGQPENNYKTTPPVLDSDGSFFLYSKLTVDKSRWQQGNVFSCSVMHEALHNHYTQKSLSLSPG

SEQ ID NO: 4999 - protein, 605 aa, synthetic construct
  REGION 1..605: note = Tr_VH-CH1/N84S/Q39K/S183E/CLD201/hole/PGLALA/RF
EVQLVESGGGLVQPGGSLRLSCAASGFNIKDTYIHWVRKAPGKGLEWVARIYPTNGYTRYADSVKGRFTISADTSKNTAYLQMSSLRAEDTAVYYCSRWGGDGFYAMDYWGQGTLVTVSSASTKGPSVFPLAPSSKSTSGGTAALGCLVKDYFPEPVTVSWNSGALTSGVHTFPAVLQSSGLYSLESVVTVPSSSLGTQTYICNVNHKPSNTKVDKKVEPKSCTDWSPYADQSIKVRISLKSALGDKAYEWNDNEMYLFRSSVAYAMRQYFLKVKNQMILFGEEDVRVANLKPRISFNFFVTAPKNVSDIIPRTEVEKAIRMSRSRINDAFRLNDNSLEFLGIQPTLGPPNQPPVSTSTSPTRSMAPGAVHLPQPVSTRDKTHTCPPCPAPEAAGGPSVFLFPPKPKDTLMISRTPEVTCVVVDVSHEDPEVKFNWYVDGVEVHNAKTKPREEQYNSTYRVVSVLTVLHQDWLNGKEYKCKVSNKALGAPIEKTISKAKGQPREPQVCTLPPSRDELTKNQVSLSCAVKGFYPSDIAVEWESNGQPENNYKTTPPVLDSDGSFFLVSKLTVDKSRWQQGNVFSCSVMHEALHNRFTQKSLSLSPG

SEQ ID NO: 5000 - protein, 443 aa, synthetic construct; identical to SEQ ID NO: 4932
  REGION 1..443: note = 388D4-3_VK-x-CH1/Q38E/S183K/knob/PGLALA

SEQ ID NO: 5001 - protein, 443 aa, synthetic construct; identical to SEQ ID NO: 4933
  REGION 1..443: note = 388D4-3_VK-x-CH1/Q38K/S183K/knob/PGLALA

SEQ ID NO: 5002 - protein, 605 aa, synthetic construct
  REGION 1..605: note = Tr_VH-CH1/N84S/Q39E/S183E/CLD201/hole/PGLALA/RF
EVQLVESGGGLVQPGGSLRLSCAASGFNIKDTYIHWVREAPGKGLEWVARIYPTNGYTRYADSVKGRFTISADTSKNTAYLQMSSLRAEDTAVYYCSRWGGDGFYAMDYWGQGTLVTVSSASTKGPSVFPLAPSSKSTSGGTAALGCLVKDYFPEPVTVSWNSGALTSGVHTFPAVLQSSGLYSLESVVTVPSSSLGTQTYICNVNHKPSNTKVDKKVEPKSCTDWSPYADQSIKVRISLKSALGDKAYEWNDNEMYLFRSSVAYAMRQYFLKVKNQMILFGEEDVRVANLKPRISFNFFVTAPKNVSDIIPRTEVEKAIRMSRSRINDAFRLNDNSLEFLGIQPTLGPPNQPPVSTSTSPTRSMAPGAVHLPQPVSTRDKTHTCPPCPAPEAAGGPSVFLFPPKPKDTLMISRTPEVTCVVVDVSHEDPEVKFNWYVDGVEVHNAKTKPREEQYNSTYRVVSVLTVLHQDWLNGKEYKCKVSNKALGAPIEKTISKAKGQPREPQVCTLPPSRDELTKNQVSLSCAVKGFYPSDIAVEWESNGQPENNYKTTPPVLDSDGSFFLVSKLTVDKSRWQQGNVFSCSVMHEALHNRFTQKSLSLSPG

SEQ ID NO: 5003 - protein, 605 aa, synthetic construct; identical to SEQ ID NO: 4930
  REGION 1..605: note = 388D4-3_VH-CH1/Q39K/S183E/CLD201/hole/PGLALA/RF

SEQ ID NO: 5004 - protein, 438 aa, synthetic construct
  REGION 1..438: note = Tr_VK-x-CH1/Q38E/S183K/knob/PGLALA
DIQMTQSPSSLSASVGDRVTITCRASQDVNTAVAWYQEKPGKAPKLLIYSASFLYSGVPSRFSGSRSGTDFTLTISSLQPEDFATYYCQQHYTTPPTFGQGTKVEIKSSASTKGPSVFPLAPSSKSTSGGTAALGCLVKDYFPEPVTVSWNSGALTSGVHTFPAVLQSSGLYSLKSVVTVPSSSLGTQTYICNVNHKPSNTKVDKKVEPKSCDKTHTCPPCPAPEAAGGPSVFLFPPKPKDTLMISRTPEVTCVVVDVSHEDPEVKFNWYVDGVEVHNAKTKPREEQYNSTYRVVSVLTVLHQDWLNGKEYKCKVSNKALGAPIEKTISKAKGQPREPQVYTLPPCRDELTKNQVSLWCLVKGFYPSDIAVEWESNGQPENNYKTTPPVLDSDGSFFLYSKLTVDKSRWQQGNVFSCSVMHEALHNHYTQKSLSLSPG

SEQ ID NO: 5005 - protein, 438 aa, synthetic construct
  REGION 1..438: note = Tr_VK-x-CH1/Q38K/S183K/knob/PGLALA
DIQMTQSPSSLSASVGDRVTITCRASQDVNTAVAWYQKKPGKAPKLLIYSASFLYSGVPSRFSGSRSGTDFTLTISSLQPEDFATYYCQQHYTTPPTFGQGTKVEIKSSASTKGPSVFPLAPSSKSTSGGTAALGCLVKDYFPEPVTVSWNSGALTSGVHTFPAVLQSSGLYSLKSVVTVPSSSLGTQTYICNVNHKPSNTKVDKKVEPKSCDKTHTCPPCPAPEAAGGPSVFLFPPKPKDTLMISRTPEVTCVVVDVSHEDPEVKFNWYVDGVEVHNAKTKPREEQYNSTYRVVSVLTVLHQDWLNGKEYKCKVSNKALGAPIEKTISKAKGQPREPQVYTLPPCRDELTKNQVSLWCLVKGFYPSDIAVEWESNGQPENNYKTTPPVLDSDGSFFLYSKLTVDKSRWQQGNVFSCSVMHEALHNHYTQKSLSLSPG

SEQ ID NO: 5006 - protein, 605 aa, synthetic construct; identical to SEQ ID NO: 4931
  REGION 1..605: note = 388D4-3_VH-CH1/Q39E/S183E/CLD201/hole/PGLALA/RF

SEQ ID NO: 5007 - protein, 604 aa, synthetic construct
  REGION 1..604: note = Ce_VH-CH1/N84S/Q39K/S183E/CLD201/hole/PGLALA/RF
QVQLKQSGPGLVQPSQSLSITCTVSGFSLTNYGVHWVRKSPGKGLEWLGVIWSGGNTDYNTPFTSRLSINKDNSKSQVFFKMSSLQSNDTAIYYCARALTYYDYEFAYWGQGTLVTVSAASTKGPSVFPLAPSSKSTSGGTAALGCLVKDYFPEPVTVSWNSGALTSGVHTFPAVLQSSGLYSLESVVTVPSSSLGTQTYICNVNHKPSNTKVDKKVEPKSCTDWSPYADQSIKVRISLKSALGDKAYEWNDNEMYLFRSSVAYAMRQYFLKVKNQMILFGEEDVRVANLKPRISFNFFVTAPKNVSDIIPRTEVEKAIRMSRSRINDAFRLNDNSLEFLGIQPTLGPPNQPPVSTSTSPTRSMAPGAVHLPQPVSTRDKTHTCPPCPAPEAAGGPSVFLFPPKPKDTLMISRTPEVTCVVVDVSHEDPEVKFNWYVDGVEVHNAKTKPREEQYNSTYRVVSVLTVLHQDWLNGKEYKCKVSNKALGAPIEKTISKAKGQPREPQVCTLPPSRDELTKNQVSLSCAVKGFYPSDIAVEWESNGQPENNYKTTPPVLDSDGSFFLVSKLTVDKSRWQQGNVFSCSVMHEALHNRFTQKSLSLSPG

SEQ ID NO: 5008 - protein, 604 aa, synthetic construct
  REGION 1..604: note = Ce_VH-CH1/N84S/Q39E/S183E/CLD201/hole/PGLALA/RF
QVQLKQSGPGLVQPSQSLSITCTVSGFSLTNYGVHWVRESPGKGLEWLGVIWSGGNTDYNTPFTSRLSINKDNSKSQVFFKMSSLQSNDTAIYYCARALTYYDYEFAYWGQGTLVTVSAASTKGPSVFPLAPSSKSTSGGTAALGCLVKDYFPEPVTVSWNSGALTSGVHTFPAVLQSSGLYSLESVVTVPSSSLGTQTYICNVNHKPSNTKVDKKVEPKSCTDWSPYADQSIKVRISLKSALGDKAYEWNDNEMYLFRSSVAYAMRQYFLKVKNQMILFGEEDVRVANLKPRISFNFFVTAPKNVSDIIPRTEVEKAIRMSRSRINDAFRLNDNSLEFLGIQPTLGPPNQPPVSTSTSPTRSMAPGAVHLPQPVSTRDKTHTCPPCPAPEAAGGPSVFLFPPKPKDTLMISRTPEVTCVVVDVSHEDPEVKFNWYVDGVEVHNAKTKPREEQYNSTYRVVSVLTVLHQDWLNGKEYKCKVSNKALGAPIEKTISKAKGQPREPQVCTLPPSRDELTKNQVSLSCAVKGFYPSDIAVEWESNGQPENNYKTTPPVLDSDGSFFLVSKLTVDKSRWQQGNVFSCSVMHEALHNRFTQKSLSLSPG

SEQ ID NO: 5009 - protein, 438 aa, synthetic construct
  REGION 1..438: note = Ce_VK-x-CH1/Q38E/S183K/knob/PGLALA
DILLTQSPVILSVSPGERVSFSCRASQSIGTNIHWYQERTNGSPRLLIKYASESISGIPSRFSGSGSGTDFTLSINSVESEDIADYYCQQNNNWPTTFGAGTKVEIKSSASTKGPSVFPLAPSSKSTSGGTAALGCLVKDYFPEPVTVSWNSGALTSGVHTFPAVLQSSGLYSLKSVVTVPSSSLGTQTYICNVNHKPSNTKVDKKVEPKSCDKTHTCPPCPAPEAAGGPSVFLFPPKPKDTLMISRTPEVTCVVVDVSHEDPEVKFNWYVDGVEVHNAKTKPREEQYNSTYRVVSVLTVLHQDWLNGKEYKCKVSNKALGAPIEKTISKAKGQPREPQVYTLPPCRDELTKNQVSLWCLVKGFYPSDIAVEWESNGQPENNYKTTPPVLDSDGSFFLYSKLTVDKSRWQQGNVFSCSVMHEALHNHYTQKSLSLSPG

SEQ ID NO: 5010 - protein, 438 aa, synthetic construct
  REGION 1..438: note = Ce_VK-x-CH1/Q38K/S183K/knob/PGLALA
DILLTQSPVILSVSPGERVSFSCRASQSIGTNIHWYQKRTNGSPRLLIKYASESISGIPSRFSGSGSGTDFTLSINSVESEDIADYYCQQNNNWPTTFGAGTKVEIKSSASTKGPSVFPLAPSSKSTSGGTAALGCLVKDYFPEPVTVSWNSGALTSGVHTFPAVLQSSGLYSLKSVVTVPSSSLGTQTYICNVNHKPSNTKVDKKVEPKSCDKTHTCPPCPAPEAAGGPSVFLFPPKPKDTLMISRTPEVTCVVVDVSHEDPEVKFNWYVDGVEVHNAKTKPREEQYNSTYRVVSVLTVLHQDWLNGKEYKCKVSNKALGAPIEKTISKAKGQPREPQVYTLPPCRDELTKNQVSLWCLVKGFYPSDIAVEWESNGQPENNYKTTPPVLDSDGSFFLYSKLTVDKSRWQQGNVFSCSVMHEALHNHYTQKSLSLSPG

SEQ ID NO: 5011 - protein, 438 aa, synthetic construct; identical to SEQ ID NO: 4967
  REGION 1..438: note = B60-55_VK-x-CH1/Q38E/S183K/knob/PGLALA

SEQ ID NO: 5012 - protein, 438 aa, synthetic construct; identical to SEQ ID NO: 4968
  REGION 1..438: note = B60-55_VK-x-CH1/Q38K/S183K/knob/PGLALA

SEQ ID NO: 5013 - protein, 605 aa, synthetic construct; identical to SEQ ID NO: 4969
  REGION 1..605: note = B60-55_VH-CH1/Q39K/S183E/CLD201/hole/PGLALA/RF

SEQ ID NO: 5014 - protein, 605 aa, synthetic construct; identical to SEQ ID NO: 4970
  REGION 1..605: note = B60-55_VH-CH1/Q39E/S183E/CLD201/hole/PGLALA/RF

SEQ ID NO: 5015 - protein, 214 aa, synthetic construct
  REGION 1..214: note = Tr_VK-CK/Q38E/V133K
DIQMTQSPSSLSASVGDRVTITCRASQDVNTAVAWYQEKPGKAPKLLIYSASFLYSGVPSRFSGSRSGTDFTLTISSLQPEDFATYYCQQHYTTPPTFGQGTKVEIKRTVAAPSVFIFPPSDEQLKSGTASVKCLLNNFYPREAKVQWKVDNALQSGNSQESVTEQDSKDSTYSLSSTLTLSKADYEKHKVYACEVTHQGLSSPVTKSFNRGEC

SEQ ID NO: 5016 - protein, 226 aa, synthetic construct
  REGION 1..226: note = Pt_VH-x-CK/N84S/Q39K/V133E
EVQLVESGGGLVQPGGSLRLSCAASGFTFTDYTMDWVRKAPGKGLEWVADVNPNSGGSIYNQRFKGRFTLSVDRSKNTLYLQMSSLRAEDTAVYYCARNLGPSFYFDYWGQGTLVTVSSASVAAPSVFIFPPSDEQLKSGTASVECLLNNFYPREAKVQWKVDNALQSGNSQESVTEQDSKDSTYSLSSTLTLSKADYEKHKVYACEVTHQGLSSPVTKSFNRGEC

SEQ ID NO: 5017 - protein, 226 aa, synthetic construct
  REGION 1..226: note = Pt_VH-x-CK/N84S/Q39E/V133E
EVQLVESGGGLVQPGGSLRLSCAASGFTFTDYTMDWVREAPGKGLEWVADVNPNSGGSIYNQRFKGRFTLSVDRSKNTLYLQMSSLRAEDTAVYYCARNLGPSFYFDYWGQGTLVTVSSASVAAPSVFIFPPSDEQLKSGTASVECLLNNFYPREAKVQWKVDNALQSGNSQESVTEQDSKDSTYSLSSTLTLSKADYEKHKVYACEVTHQGLSSPVTKSFNRGEC

SEQ ID NO: 5018 - protein, 214 aa, synthetic construct
  REGION 1..214: note = Tr_VK-CK/Q38K/V133K
DIQMTQSPSSLSASVGDRVTITCRASQDVNTAVAWYQKKPGKAPKLLIYSASFLYSGVPSRFSGSRSGTDFTLTISSLQPEDFATYYCQQHYTTPPTFGQGTKVEIKRTVAAPSVFIFPPSDEQLKSGTASVKCLLNNFYPREAKVQWKVDNALQSGNSQESVTEQDSKDSTYSLSSTLTLSKADYEKHKVYACEVTHQGLSSPVTKSFNRGEC

SEQ ID NO: 5019 - protein, 214 aa, synthetic construct
  REGION 1..214: note = Pt_VK-CK/Q38E/V133K
DIQMTQSPSSLSASVGDRVTITCKASQDVSIGVAWYQEKPGKAPKLLIYSASYRYTGVPSRFSGSGSGTDFTLTISSLQPEDFATYYCQQYYIYPYTFGQGTKVEIKRTVAAPSVFIFPPSDEQLKSGTASVKCLLNNFYPREAKVQWKVDNALQSGNSQESVTEQDSKDSTYSLSSTLTLSKADYEKHKVYACEVTHQGLSSPVTKSFNRGEC

SEQ ID NO: 5020 - protein, 227 aa, synthetic construct
  REGION 1..227: note = Tr_VH-x-CK/N84S/Q39K/V133E
EVQLVESGGGLVQPGGSLRLSCAASGFNIKDTYIHWVRKAPGKGLEWVARIYPTNGYTRYADSVKGRFTISADTSKNTAYLQMSSLRAEDTAVYYCSRWGGDGFYAMDYWGQGTLVTVSSASVAAPSVFIFPPSDEQLKSGTASVECLLNNFYPREAKVQWKVDNALQSGNSQESVTEQDSKDSTYSLSSTLTLSKADYEKHKVYACEVTHQGLSSPVTKSFNRGEC

SEQ ID NO: 5021 - protein, 227 aa, synthetic construct
  REGION 1..227: note = Tr_VH-x-CK/N84S/Q39E/V133E
EVQLVESGGGLVQPGGSLRLSCAASGFNIKDTYIHWVREAPGKGLEWVARIYPTNGYTRYADSVKGRFTISADTSKNTAYLQMSSLRAEDTAVYYCSRWGGDGFYAMDYWGQGTLVTVSSASVAAPSVFIFPPSDEQLKSGTASVECLLNNFYPREAKVQWKVDNALQSGNSQESVTEQDSKDSTYSLSSTLTLSKADYEKHKVYACEVTHQGLSSPVTKSFNRGEC

SEQ ID NO: 5022 - protein, 214 aa, synthetic construct
  REGION 1..214: note = Pt_VK-CK/Q38K/V133K
DIQMTQSPSSLSASVGDRVTITCKASQDVSIGVAWYQKKPGKAPKLLIYSASYRYTGVPSRFSGSGSGTDFTLTISSLQPEDFATYYCQQYYIYPYTFGQGTKVEIKRTVAAPSVFIFPPSDEQLKSGTASVKCLLNNFYPREAKVQWKVDNALQSGNSQESVTEQDSKDSTYSLSSTLTLSKADYEKHKVYACEVTHQGLSSPVTKSFNRGEC

SEQ ID NO: 5023 - protein, 214 aa, synthetic construct
  REGION 1..214: note = Ce_VK-CK/Q38E/V133K
DILLTQSPVILSVSPGERVSFSCRASQSIGTNIHWYQERTNGSPRLLIKYASESISGIPSRFSGSGSGTDFTLSINSVESEDIADYYCQQNNNWPTTFGAGTKLELKRTVAAPSVFIFPPSDEQLKSGTASVKCLLNNFYPREAKVQWKVDNALQSGNSQESVTEQDSKDSTYSLSSTLTLSKADYEKHKVYACEVTHQGLSSPVTKSFNRGEC

SEQ ID NO: 5024 - protein, 214 aa, synthetic construct
  REGION 1..214: note = Ce _VK-CK/Q38K/V133K
DILLTQSPVILSVSPGERVSFSCRASQSIGTNIHWYQKRTNGSPRLLIKYASESISGIPSRFSGSGSGTDFTLSINSVESEDIADYYCQQNNNWPTTFGAGTKLELKRTVAAPSVFIFPPSDEQLKSGTASVKCLLNNFYPREAKVQWKVDNALQSGNSQESVTEQDSKDSTYSLSSTLTLSKADYEKHKVYACEVTHQGLSSPVTKSFNRGEC

SEQ ID NO: 5025 - protein, 226 aa, synthetic construct
  REGION 1..226: note = Ce_VH-x-CK/N84S/Q39K/V133E
QVQLKQSGPGLVQPSQSLSITCTVSGFSLTNYGVHWVRKSPGKGLEWLGVIWSGGNTDYNTPFTSRLSINKDNSKSQVFFKMSSLQSNDTAIYYCARALTYYDYEFAYWGQGTLVTVSSASVAAPSVFIFPPSDEQLKSGTASVECLLNNFYPREAKVQWKVDNALQSGNSQESVTEQDSKDSTYSLSSTLTLSKADYEKHKVYACEVTHQGLSSPVTKSFNRGEC

SEQ ID NO: 5026 - protein, 226 aa, synthetic construct
  REGION 1..226: note = Ce_VH-x-CK/N84S/Q39E/V133E
QVQLKQSGPGLVQPSQSLSITCTVSGFSLTNYGVHWVRESPGKGLEWLGVIWSGGNTDYNTPFTSRLSINKDNSKSQVFFKMSSLQSNDTAIYYCARALTYYDYEFAYWGQGTLVTVSSASVAAPSVFIFPPSDEQLKSGTASVECLLNNFYPREAKVQWKVDNALQSGNSQESVTEQDSKDSTYSLSSTLTLSKADYEKHKVYACEVTHQGLSSPVTKSFNRGEC

SEQ ID NO: 5027 - protein, 227 aa, synthetic construct; identical to SEQ ID NO: 4948
  REGION 1..227: note = 388D4-3_VH-x-CK/Q39K/V133E

SEQ ID NO: 5028 - protein, 227 aa, synthetic construct; identical to SEQ ID NO: 4949
  REGION 1..227: note = 388D4-3_VH-x-CK/Q39E/V133E

SEQ ID NO: 5029 - protein, 219 aa, synthetic construct; identical to SEQ ID NO: 4946
  REGION 1..219: note = 388D4-3_VK-CK/Q38E/V133K

SEQ ID NO: 5030 - protein, 219 aa, synthetic construct; identical to SEQ ID NO: 4947
  REGION 1..219: note = 388D4-3_VK-CK/Q38K/V133K

SEQ ID NO: 5031 - protein, 227 aa, synthetic construct; identical to SEQ ID NO: 4983
  REGION 1..227: note = B60-55_VH-x-CK/Q39K/V133E

SEQ ID NO: 5032 - protein, 227 aa, synthetic construct; identical to SEQ ID NO: 4984
  REGION 1..227: note = B60-55_VH-x-CK/Q39E/V133E

SEQ ID NO: 5033 - protein, 214 aa, synthetic construct; identical to SEQ ID NO: 4985
  REGION 1..214: note = B60-55_VK-CK/Q38E/V133K

SEQ ID NO: 5034 - protein, 214 aa, synthetic construct; identical to SEQ ID NO: 4986
  REGION 1..214: note = B60-55_VK-CK/Q38K/V133K

SEQ ID NO: 5035 - protein, 1185 aa, synthetic construct
  REGION 1..1185: note = R_VH-CH1/Q39K/S183E/CLD201/hole/PGLALA/RF/41BBL
QVQLQQPGAELVKPGASVKMSCKASGYTFTSYNMHWVKKTPGRGLEWIGAIYPGNGDTSYNQKFKGKATLTADKSSSTAYMQLSSLTSEDSAVYYCARSTYYGGDWYFNVWGAGTTVTVSAASTKGPSVFPLAPSSKSTSGGTAALGCLVKDYFPEPVTVSWNSGALTSGVHTFPAVLQSSGLYSLESVVTVPSSSLGTQTYICNVNHKPSNTKVDKKVEPKSCTDWSPYADQSIKVRISLKSALGDKAYEWNDNEMYLFRSSVAYAMRQYFLKVKNQMILFGEEDVRVANLKPRISFNFFVTAPKNVSDIIPRTEVEKAIRMSRSRINDAFRLNDNSLEFLGIQPTLGPPNQPPVSTSTSPTRSMAPGAVHLPQPVSTRDKTHTCPPCPAPEAAGGPSVFLFPPKPKDTLMISRTPEVTCVVVDVSHEDPEVKFNWYVDGVEVHNAKTKPREEQYNSTYRVVSVLTVLHQDWLNGKEYKCKVSNKALGAPIEKTISKAKGQPREPQVCTLPPSRDELTKNQVSLSCAVKGFYPSDIAVEWESNGQPENNYKTTPPVLDSDGSFFLVSKLTVDKSRWQQGNVFSCSVMHEALHNRFTQKSLSLSPGGGGSGGGGSREGPELSPDDPAGLLDLRQGMFAQLVAQNVLLIDGPLSWYSDPGLAGVSLTGGLSYKEDTKELVVAKAGVYYVFFQLELRRVVAGEGSGSVSLALHLQPLRSAAGAAALALTVDLPPASSEARNSAFGFQGRLLHLSAGQRLGVHLHTEARARHAWQLTQGATVLGLFRVTPEIPAGLPSPRSEGGGSGGGGSREGPELSPDDPAGLLDLRQGMFAQLVAQNVLLIDGPLSWYSDPGLAGVSLTGGLSYKEDTKELVVAKAGVYYVFFQLELRRVVAGEGSGSVSLALHLQPLRSAAGAAALALTVDLPPASSEARNSAFGFQGRLLHLSAGQRLGVHLHTEARARHAWQLTQGATVLGLFRVTPEIPAGLPSPRSEGGGSGGGGSREGPELSPDDPAGLLDLRQGMFAQLVAQNVLLIDGPLSWYSDPGLAGVSLTGGLSYKEDTKELVVAKAGVYYVFFQLELRRVVAGEGSGSVSLALHLQPLRSAAGAAALALTVDLPPASSEARNSAFGFQGRLLHLSAGQRLGVHLHTEARARHAWQLTQGATVLGLFRVTPEIPAGLPSPRSE

SEQ ID NO: 5036 - protein, 440 aa, synthetic construct; identical to SEQ ID NO: 661
  REGION 1..440: note = Sp34_VK-CH1/knob/Q38E/S183K/PGLALA/RF

SEQ ID NO: 5037 - protein, 440 aa, synthetic construct; identical to SEQ ID NO: 662
  REGION 1..440: note = Sp34_VK-CH1/knob/Q38K/S183K/PGLALA/RF

SEQ ID NO: 5038 - protein, 606 aa, synthetic construct; identical to SEQ ID NO: 725
  REGION 1..606: note = R_VH-CH1/Q39K/S183E/CLD201/hole/PGLALA/RF

SEQ ID NO: 5039 - protein, 1019 aa, synthetic construct
  REGION 1..1019: note = Sp34_VK-CH1/knob/Q38E/S183K/PGLALA/RF/41BBL
QAVVTQEPSLTVSPGGTVTLTCGSSTGAVTTSNYANWVQEKPGQAFRGLIGGTNKRAPGTPARFSGSLLGGKAALTLSGAQPEDEAEYYCALWYSNLWVFGGGTKLTVLSSASTKGPSVFPLAPSSKSTSGGTAALGCLVKDYFPEPVTVSWNSGALTSGVHTFPAVLQSSGLYSLKSVVTVPSSSLGTQTYICNVNHKPSNTKVDKKVEPKSCDKTHTCPPCPAPEAAGGPSVFLFPPKPKDTLMISRTPEVTCVVVDVSHEDPEVKFNWYVDGVEVHNAKTKPREEQYNSTYRVVSVLTVLHQDWLNGKEYKCKVSNKALGAPIEKTISKAKGQPREPQVYTLPPCRDELTKNQVSLWCLVKGFYPSDIAVEWESNGQPENNYKTTPPVLDSDGSFFLYSKLTVDKSRWQQGNVFSCSVMHEALHNRFTQKSLSLSPGGGGSGGGGSREGPELSPDDPAGLLDLRQGMFAQLVAQNVLLIDGPLSWYSDPGLAGVSLTGGLSYKEDTKELVVAKAGVYYVFFQLELRRVVAGEGSGSVSLALHLQPLRSAAGAAALALTVDLPPASSEARNSAFGFQGRLLHLSAGQRLGVHLHTEARARHAWQLTQGATVLGLFRVTPEIPAGLPSPRSEGGGSGGGGSREGPELSPDDPAGLLDLRQGMFAQLVAQNVLLIDGPLSWYSDPGLAGVSLTGGLSYKEDTKELVVAKAGVYYVFFQLELRRVVAGEGSGSVSLALHLQPLRSAAGAAALALTVDLPPASSEARNSAFGFQGRLLHLSAGQRLGVHLHTEARARHAWQLTQGATVLGLFRVTPEIPAGLPSPRSEGGGSGGGGSREGPELSPDDPAGLLDLRQGMFAQLVAQNVLLIDGPLSWYSDPGLAGVSLTGGLSYKEDTKELVVAKAGVYYVFFQLELRRVVAGEGSGSVSLALHLQPLRSAAGAAALALTVDLPPASSEARNSAFGFQGRLLHLSAGQRLGVHLHTEARARHAWQLTQGATVLGLFRVTPEIPAGLPSPRSE

SEQ ID NO: 5040 - protein, 1019 aa, synthetic construct
  REGION 1..1019: note = Sp34_VK-CH1/knob/Q38K/S183K/PGLALA/RF/41BBL
QAVVTQEPSLTVSPGGTVTLTCGSSTGAVTTSNYANWVQKKPGQAFRGLIGGTNKRAPGTPARFSGSLLGGKAALTLSGAQPEDEAEYYCALWYSNLWVFGGGTKLTVLSSASTKGPSVFPLAPSSKSTSGGTAALGCLVKDYFPEPVTVSWNSGALTSGVHTFPAVLQSSGLYSLKSVVTVPSSSLGTQTYICNVNHKPSNTKVDKKVEPKSCDKTHTCPPCPAPEAAGGPSVFLFPPKPKDTLMISRTPEVTCVVVDVSHEDPEVKFNWYVDGVEVHNAKTKPREEQYNSTYRVVSVLTVLHQDWLNGKEYKCKVSNKALGAPIEKTISKAKGQPREPQVYTLPPCRDELTKNQVSLWCLVKGFYPSDIAVEWESNGQPENNYKTTPPVLDSDGSFFLYSKLTVDKSRWQQGNVFSCSVMHEALHNRFTQKSLSLSPGGGGSGGGGSREGPELSPDDPAGLLDLRQGMFAQLVAQNVLLIDGPLSWYSDPGLAGVSLTGGLSYKEDTKELVVAKAGVYYVFFQLELRRVVAGEGSGSVSLALHLQPLRSAAGAAALALTVDLPPASSEARNSAFGFQGRLLHLSAGQRLGVHLHTEARARHAWQLTQGATVLGLFRVTPEIPAGLPSPRSEGGGSGGGGSREGPELSPDDPAGLLDLRQGMFAQLVAQNVLLIDGPLSWYSDPGLAGVSLTGGLSYKEDTKELVVAKAGVYYVFFQLELRRVVAGEGSGSVSLALHLQPLRSAAGAAALALTVDLPPASSEARNSAFGFQGRLLHLSAGQRLGVHLHTEARARHAWQLTQGATVLGLFRVTPEIPAGLPSPRSEGGGSGGGGSREGPELSPDDPAGLLDLRQGMFAQLVAQNVLLIDGPLSWYSDPGLAGVSLTGGLSYKEDTKELVVAKAGVYYVFFQLELRRVVAGEGSGSVSLALHLQPLRSAAGAAALALTVDLPPASSEARNSAFGFQGRLLHLSAGQRLGVHLHTEARARHAWQLTQGATVLGLFRVTPEIPAGLPSPRSE

SEQ ID NO: 5041 - protein, 594 aa, synthetic construct; identical to SEQ ID NO: 4666
  REGION 1..594: note = R_VH-CH1/Q39K/S183E/CLD201/Sp34_VK-CH1/Q38E/S183K

SEQ ID NO: 5042 - protein, 594 aa, synthetic construct; identical to SEQ ID NO: 4667
  REGION 1..594: note = R_VH-CH1/Q39K/S183E/CLD201/Sp34_VK-CH1/Q38K/S183K

SEQ ID NO: 5043 - protein, 1173 aa, synthetic construct
  REGION 1..1173: note R_VH-CH1/Q39K/S183E/CLD201/Sp34_VK-CH1/Q38E/S183K/41BBL
QVQLQQPGAELVKPGASVKMSCKASGYTFTSYNMHWVKKTPGRGLEWIGAIYPGNGDTSYNQKFKGKATLTADKSSSTAYMQLSSLTSEDSAVYYCARSTYYGGDWYFNVWGAGTTVTVSAASTKGPSVFPLAPSSKSTSGGTAALGCLVKDYFPEPVTVSWNSGALTSGVHTFPAVLQSSGLYSLESVVTVPSSSLGTQTYICNVNHKPSNTKVDKKVEPKSCTDWSPYADQSIKVRISLKSALGDKAYEWNDNEMYLFRSSVAYAMRQYFLKVKNQMILFGEEDVRVANLKPRISFNFFVTAPKNVSDIIPRTEVEKAIRMSRSRINDAFRLNDNSLEFLGIQPTLGPPNQPPVSTSTSPTRSMAPGAVHLPQPVSTRQAVVTQEPSLTVSPGGTVTLTCGSSTGAVTTSNYANWVQEKPGQAFRGLIGGTNKRAPGTPARFSGSLLGGKAALTLSGAQPEDEAEYYCALWYSNLWVFGGGTKLTVLSSASTKGPSVFPLAPSSKSTSGGTAALGCLVKDYFPEPVTVSWNSGALTSGVHTFPAVLQSSGLYSLKSVVTVPSSSLGTQTYICNVNHKPSNTKVDKKVEPKSCGGGSGGGGSREGPELSPDDPAGLLDLRQGMFAQLVAQNVLLIDGPLSWYSDPGLAGVSLTGGLSYKEDTKELVVAKAGVYYVFFQLELRRVVAGEGSGSVSLALHLQPLRSAAGAAALALTVDLPPASSEARNSAFGFQGRLLHLSAGQRLGVHLHTEARARHAWQLTQGATVLGLFRVTPEIPAGLPSPRSEGGGSGGGGSREGPELSPDDPAGLLDLRQGMFAQLVAQNVLLIDGPLSWYSDPGLAGVSLTGGLSYKEDTKELVVAKAGVYYVFFQLELRRVVAGEGSGSVSLALHLQPLRSAAGAAALALTVDLPPASSEARNSAFGFQGRLLHLSAGQRLGVHLHTEARARHAWQLTQGATVLGLFRVTPEIPAGLPSPRSEGGGSGGGGSREGPELSPDDPAGLLDLRQGMFAQLVAQNVLLIDGPLSWYSDPGLAGVSLTGGLSYKEDTKELVVAKAGVYYVFFQLELRRVVAGEGSGSVSLALHLQPLRSAAGAAALALTVDLPPASSEARNSAFGFQGRLLHLSAGQRLGVHLHTEARARHAWQLTQGATVLGLFRVTPEIPAGLPSPRSE

SEQ ID NO: 5044 - protein, 1173 aa, synthetic construct
  REGION 1..1173: note R_VH-CH1/Q39K/S183E/CLD201/Sp34_VK-CH1/Q38K/S183K/41BBL
QVQLQQPGAELVKPGASVKMSCKASGYTFTSYNMHWVKKTPGRGLEWIGAIYPGNGDTSYNQKFKGKATLTADKSSSTAYMQLSSLTSEDSAVYYCARSTYYGGDWYFNVWGAGTTVTVSAASTKGPSVFPLAPSSKSTSGGTAALGCLVKDYFPEPVTVSWNSGALTSGVHTFPAVLQSSGLYSLESVVTVPSSSLGTQTYICNVNHKPSNTKVDKKVEPKSCTDWSPYADQSIKVRISLKSALGDKAYEWNDNEMYLFRSSVAYAMRQYFLKVKNQMILFGEEDVRVANLKPRISFNFFVTAPKNVSDIIPRTEVEKAIRMSRSRINDAFRLNDNSLEFLGIQPTLGPPNQPPVSTSTSPTRSMAPGAVHLPQPVSTRQAVVTQEPSLTVSPGGTVTLTCGSSTGAVTTSNYANWVQKKPGQAFRGLIGGTNKRAPGTPARFSGSLLGGKAALTLSGAQPEDEAEYYCALWYSNLWVFGGGTKLTVLSSASTKGPSVFPLAPSSKSTSGGTAALGCLVKDYFPEPVTVSWNSGALTSGVHTFPAVLQSSGLYSLKSVVTVPSSSLGTQTYICNVNHKPSNTKVDKKVEPKSCGGGSGGGGSREGPELSPDDPAGLLDLRQGMFAQLVAQNVLLIDGPLSWYSDPGLAGVSLTGGLSYKEDTKELVVAKAGVYYVFFQLELRRVVAGEGSGSVSLALHLQPLRSAAGAAALALTVDLPPASSEARNSAFGFQGRLLHLSAGQRLGVHLHTEARARHAWQLTQGATVLGLFRVTPEIPAGLPSPRSEGGGSGGGGSREGPELSPDDPAGLLDLRQGMFAQLVAQNVLLIDGPLSWYSDPGLAGVSLTGGLSYKEDTKELVVAKAGVYYVFFQLELRRVVAGEGSGSVSLALHLQPLRSAAGAAALALTVDLPPASSEARNSAFGFQGRLLHLSAGQRLGVHLHTEARARHAWQLTQGATVLGLFRVTPEIPAGLPSPRSEGGGSGGGGSREGPELSPDDPAGLLDLRQGMFAQLVAQNVLLIDGPLSWYSDPGLAGVSLTGGLSYKEDTKELVVAKAGVYYVFFQLELRRVVAGEGSGSVSLALHLQPLRSAAGAAALALTVDLPPASSEARNSAFGFQGRLLHLSAGQRLGVHLHTEARARHAWQLTQGATVLGLFRVTPEIPAGLPSPRSE

SEQ ID NO: 5045 - protein, 440 aa, synthetic construct; identical to SEQ ID NO: 658
  REGION 1..440: note = Sp34_VK-CH1/knob/Q38E/S183K/PGLALA

SEQ ID NO: 5046 - protein, 440 aa, synthetic construct; identical to SEQ ID NO: 659
  REGION 1..440: note = Sp34_VK-CH1/knob/Q38K/S183K/PGLALA

SEQ ID NO: 5047 - protein, 1019 aa, synthetic construct
  REGION 1..1019: note = Sp34_VK-CH1/knob/Q38E/S183K/PGLALA/41BBL
QAVVTQEPSLTVSPGGTVTLTCGSSTGAVTTSNYANWVQEKPGQAFRGLIGGTNKRAPGTPARFSGSLLGGKAALTLSGAQPEDEAEYYCALWYSNLWVFGGGTKLTVLSSASTKGPSVFPLAPSSKSTSGGTAALGCLVKDYFPEPVTVSWNSGALTSGVHTFPAVLQSSGLYSLKSVVTVPSSSLGTQTYICNVNHKPSNTKVDKKVEPKSCDKTHTCPPCPAPEAAGGPSVFLFPPKPKDTLMISRTPEVTCVVVDVSHEDPEVKFNWYVDGVEVHNAKTKPREEQYNSTYRVVSVLTVLHQDWLNGKEYKCKVSNKALGAPIEKTISKAKGQPREPQVYTLPPCRDELTKNQVSLWCLVKGFYPSDIAVEWESNGQPENNYKTTPPVLDSDGSFFLYSKLTVDKSRWQQGNVFSCSVMHEALHNHYTQKSLSLSPGGGGSGGGGSREGPELSPDDPAGLLDLRQGMFAQLVAQNVLLIDGPLSWYSDPGLAGVSLTGGLSYKEDTKELVVAKAGVYYVFFQLELRRVVAGEGSGSVSLALHLQPLRSAAGAAALALTVDLPPASSEARNSAFGFQGRLLHLSAGQRLGVHLHTEARARHAWQLTQGATVLGLFRVTPEIPAGLPSPRSEGGGSGGGGSREGPELSPDDPAGLLDLRQGMFAQLVAQNVLLIDGPLSWYSDPGLAGVSLTGGLSYKEDTKELVVAKAGVYYVFFQLELRRVVAGEGSGSVSLALHLQPLRSAAGAAALALTVDLPPASSEARNSAFGFQGRLLHLSAGQRLGVHLHTEARARHAWQLTQGATVLGLFRVTPEIPAGLPSPRSEGGGSGGGGSREGPELSPDDPAGLLDLRQGMFAQLVAQNVLLIDGPLSWYSDPGLAGVSLTGGLSYKEDTKELVVAKAGVYYVFFQLELRRVVAGEGSGSVSLALHLQPLRSAAGAAALALTVDLPPASSEARNSAFGFQGRLLHLSAGQRLGVHLHTEARARHAWQLTQGATVLGLFRVTPEIPAGLPSPRSE

SEQ ID NO: 5048 - protein, 1019 aa, synthetic construct
  REGION 1..1019: note = Sp34_VK-CH1/knob/Q38K/S183K/PGLALA/41BBL
QAVVTQEPSLTVSPGGTVTLTCGSSTGAVTTSNYANWVQKKPGQAFRGLIGGTNKRAPGTPARFSGSLLGGKAALTLSGAQPEDEAEYYCALWYSNLWVFGGGTKLTVLSSASTKGPSVFPLAPSSKSTSGGTAALGCLVKDYFPEPVTVSWNSGALTSGVHTFPAVLQSSGLYSLKSVVTVPSSSLGTQTYICNVNHKPSNTKVDKKVEPKSCDKTHTCPPCPAPEAAGGPSVFLFPPKPKDTLMISRTPEVTCVVVDVSHEDPEVKFNWYVDGVEVHNAKTKPREEQYNSTYRVVSVLTVLHQDWLNGKEYKCKVSNKALGAPIEKTISKAKGQPREPQVYTLPPCRDELTKNQVSLWCLVKGFYPSDIAVEWESNGQPENNYKTTPPVLDSDGSFFLYSKLTVDKSRWQQGNVFSCSVMHEALHNHYTQKSLSLSPGGGGSGGGGSREGPELSPDDPAGLLDLRQGMFAQLVAQNVLLIDGPLSWYSDPGLAGVSLTGGLSYKEDTKELVVAKAGVYYVFFQLELRRVVAGEGSGSVSLALHLQPLRSAAGAAALALTVDLPPASSEARNSAFGFQGRLLHLSAGQRLGVHLHTEARARHAWQLTQGATVLGLFRVTPEIPAGLPSPRSEGGGSGGGGSREGPELSPDDPAGLLDLRQGMFAQLVAQNVLLIDGPLSWYSDPGLAGVSLTGGLSYKEDTKELVVAKAGVYYVFFQLELRRVVAGEGSGSVSLALHLQPLRSAAGAAALALTVDLPPASSEARNSAFGFQGRLLHLSAGQRLGVHLHTEARARHAWQLTQGATVLGLFRVTPEIPAGLPSPRSEGGGSGGGGSREGPELSPDDPAGLLDLRQGMFAQLVAQNVLLIDGPLSWYSDPGLAGVSLTGGLSYKEDTKELVVAKAGVYYVFFQLELRRVVAGEGSGSVSLALHLQPLRSAAGAAALALTVDLPPASSEARNSAFGFQGRLLHLSAGQRLGVHLHTEARARHAWQLTQGATVLGLFRVTPEIPAGLPSPRSE

SEQ ID NO: 5049 - protein, 1184 aa, synthetic construct
  REGION 1..1184: note = Tr_VH-CH1/N84S/Q39K/S183E/CLD201/hole/PGLALA/RF/41BBL
EVQLVESGGGLVQPGGSLRLSCAASGFNIKDTYIHWVRKAPGKGLEWVARIYPTNGYTRYADSVKGRFTISADTSKNTAYLQMSSLRAEDTAVYYCSRWGGDGFYAMDYWGQGTLVTVSSASTKGPSVFPLAPSSKSTSGGTAALGCLVKDYFPEPVTVSWNSGALTSGVHTFPAVLQSSGLYSLESVVTVPSSSLGTQTYICNVNHKPSNTKVDKKVEPKSCTDWSPYADQSIKVRISLKSALGDKAYEWNDNEMYLFRSSVAYAMRQYFLKVKNQMILFGEEDVRVANLKPRISFNFFVTAPKNVSDIIPRTEVEKAIRMSRSRINDAFRLNDNSLEFLGIQPTLGPPNQPPVSTSTSPTRSMAPGAVHLPQPVSTRDKTHTCPPCPAPEAAGGPSVFLFPPKPKDTLMISRTPEVTCVVVDVSHEDPEVKFNWYVDGVEVHNAKTKPREEQYNSTYRVVSVLTVLHQDWLNGKEYKCKVSNKALGAPIEKTISKAKGQPREPQVCTLPPSRDELTKNQVSLSCAVKGFYPSDIAVEWESNGQPENNYKTTPPVLDSDGSFFLVSKLTVDKSRWQQGNVFSCSVMHEALHNRFTQKSLSLSPGGGGSGGGGSREGPELSPDDPAGLLDLRQGMFAQLVAQNVLLIDGPLSWYSDPGLAGVSLTGGLSYKEDTKELVVAKAGVYYVFFQLELRRVVAGEGSGSVSLALHLQPLRSAAGAAALALTVDLPPASSEARNSAFGFQGRLLHLSAGQRLGVHLHTEARARHAWQLTQGATVLGLFRVTPEIPAGLPSPRSEGGGSGGGGSREGPELSPDDPAGLLDLRQGMFAQLVAQNVLLIDGPLSWYSDPGLAGVSLTGGLSYKEDTKELVVAKAGVYYVFFQLELRRVVAGEGSGSVSLALHLQPLRSAAGAAALALTVDLPPASSEARNSAFGFQGRLLHLSAGQRLGVHLHTEARARHAWQLTQGATVLGLFRVTPEIPAGLPSPRSEGGGSGGGGSREGPELSPDDPAGLLDLRQGMFAQLVAQNVLLIDGPLSWYSDPGLAGVSLTGGLSYKEDTKELVVAKAGVYYVFFQLELRRVVAGEGSGSVSLALHLQPLRSAAGAAALALTVDLPPASSEARNSAFGFQGRLLHLSAGQRLGVHLHTEARARHAWQLTQGATVLGLFRVTPEIPAGLPSPRSE

SEQ ID NO: 5050 - protein, 605 aa, synthetic construct; identical to SEQ ID NO: 4999
  REGION 1..605: note = Tr_VH-CH1/N84S/Q39K/S183E/CLD201/hole/PGLALA/RF

SEQ ID NO: 5051 - protein, 593 aa, synthetic construct
  REGION 1..593: note Tr_VH-CH1/N84S/Q39K/S183E/CLD201/Sp34_VK-CH1/Q38E/S183K
EVQLVESGGGLVQPGGSLRLSCAASGFNIKDTYIHWVRKAPGKGLEWVARIYPTNGYTRYADSVKGRFTISADTSKNTAYLQMSSLRAEDTAVYYCSRWGGDGFYAMDYWGQGTLVTVSSASTKGPSVFPLAPSSKSTSGGTAALGCLVKDYFPEPVTVSWNSGALTSGVHTFPAVLQSSGLYSLESVVTVPSSSLGTQTYICNVNHKPSNTKVDKKVEPKSCTDWSPYADQSIKVRISLKSALGDKAYEWNDNEMYLFRSSVAYAMRQYFLKVKNQMILFGEEDVRVANLKPRISFNFFVTAPKNVSDIIPRTEVEKAIRMSRSRINDAFRLNDNSLEFLGIQPTLGPPNQPPVSTSTSPTRSMAPGAVHLPQPVSTRQAVVTQEPSLTVSPGGTVTLTCGSSTGAVTTSNYANWVQEKPGQAFRGLIGGTNKRAPGTPARFSGSLLGGKAALTLSGAQPEDEAEYYCALWYSNLWVFGGGTKLTVLSSASTKGPSVFPLAPSSKSTSGGTAALGCLVKDYFPEPVTVSWNSGALTSGVHTFPAVLQSSGLYSLKSVVTVPSSSLGTQTYICNVNHKPSNTKVDKKVEPKSC

SEQ ID NO: 5052 - protein, 593 aa, synthetic construct
  REGION 1..593: note Tr_VH-CH1/N84S/Q39K/S183E/CLD201/Sp34_VK-CH1/Q38K/S183K
EVQLVESGGGLVQPGGSLRLSCAASGFNIKDTYIHWVRKAPGKGLEWVARIYPTNGYTRYADSVKGRFTISADTSKNTAYLQMSSLRAEDTAVYYCSRWGGDGFYAMDYWGQGTLVTVSSASTKGPSVFPLAPSSKSTSGGTAALGCLVKDYFPEPVTVSWNSGALTSGVHTFPAVLQSSGLYSLESVVTVPSSSLGTQTYICNVNHKPSNTKVDKKVEPKSCTDWSPYADQSIKVRISLKSALGDKAYEWNDNEMYLFRSSVAYAMRQYFLKVKNQMILFGEEDVRVANLKPRISFNFFVTAPKNVSDIIPRTEVEKAIRMSRSRINDAFRLNDNSLEFLGIQPTLGPPNQPPVSTSTSPTRSMAPGAVHLPQPVSTRQAVVTQEPSLTVSPGGTVTLTCGSSTGAVTTSNYANWVQKKPGQAFRGLIGGTNKRAPGTPARFSGSLLGGKAALTLSGAQPEDEAEYYCALWYSNLWVFGGGTKLTVLSSASTKGPSVFPLAPSSKSTSGGTAALGCLVKDYFPEPVTVSWNSGALTSGVHTFPAVLQSSGLYSLKSVVTVPSSSLGTQTYICNVNHKPSNTKVDKKVEPKSC

SEQ ID NO: 5053 - protein, 1172 aa, synthetic construct
  REGION 1..1172: note Tr_VH-CH1/N84S/Q39K/S183E/CLD201/Sp34_VK-CH1/Q38E/S183K/41B BL
EVQLVESGGGLVQPGGSLRLSCAASGFNIKDTYIHWVRKAPGKGLEWVARIYPTNGYTRYADSVKGRFTISADTSKNTAYLQMSSLRAEDTAVYYCSRWGGDGFYAMDYWGQGTLVTVSSASTKGPSVFPLAPSSKSTSGGTAALGCLVKDYFPEPVTVSWNSGALTSGVHTFPAVLQSSGLYSLESVVTVPSSSLGTQTYICNVNHKPSNTKVDKKVEPKSCTDWSPYADQSIKVRISLKSALGDKAYEWNDNEMYLFRSSVAYAMRQYFLKVKNQMILFGEEDVRVANLKPRISFNFFVTAPKNVSDIIPRTEVEKAIRMSRSRINDAFRLNDNSLEFLGIQPTLGPPNQPPVSTSTSPTRSMAPGAVHLPQPVSTRQAVVTQEPSLTVSPGGTVTLTCGSSTGAVTTSNYANWVQEKPGQAFRGLIGGTNKRAPGTPARFSGSLLGGKAALTLSGAQPEDEAEYYCALWYSNLWVFGGGTKLTVLSSASTKGPSVFPLAPSSKSTSGGTAALGCLVKDYFPEPVTVSWNSGALTSGVHTFPAVLQSSGLYSLKSVVTVPSSSLGTQTYICNVNHKPSNTKVDKKVEPKSCGGGSGGGGSREGPELSPDDPAGLLDLRQGMFAQLVAQNVLLIDGPLSWYSDPGLAGVSLTGGLSYKEDTKELVVAKAGVYYVFFQLELRRVVAGEGSGSVSLALHLQPLRSAAGAAALALTVDLPPASSEARNSAFGFQGRLLHLSAGQRLGVHLHTEARARHAWQLTQGATVLGLFRVTPEIPAGLPSPRSEGGGSGGGGSREGPELSPDDPAGLLDLRQGMFAQLVAQNVLLIDGPLSWYSDPGLAGVSLTGGLSYKEDTKELVVAKAGVYYVFFQLELRRVVAGEGSGSVSLALHLQPLRSAAGAAALALTVDLPPASSEARNSAFGFQGRLLHLSAGQRLGVHLHTEARARHAWQLTQGATVLGLFRVTPEIPAGLPSPRSEGGGSGGGGSREGPELSPDDPAGLLDLRQGMFAQLVAQNVLLIDGPLSWYSDPGLAGVSLTGGLSYKEDTKELVVAKAGVYYVFFQLELRRVVAGEGSGSVSLALHLQPLRSAAGAAALALTVDLPPASSEARNSAFGFQGRLLHLSAGQRLGVHLHTEARARHAWQLTQGATVLGLFRVTPEIPAGLPSPRSE

SEQ ID NO: 5054 - protein, 1172 aa, synthetic construct
  REGION 1..1172: note Tr_VH-CH1/N84S/Q39K/S183E/CLD201/Sp34_VK-CH1/Q38K/S183K/41B BL
EVQLVESGGGLVQPGGSLRLSCAASGFNIKDTYIHWVRKAPGKGLEWVARIYPTNGYTRYADSVKGRFTISADTSKNTAYLQMSSLRAEDTAVYYCSRWGGDGFYAMDYWGQGTLVTVSSASTKGPSVFPLAPSSKSTSGGTAALGCLVKDYFPEPVTVSWNSGALTSGVHTFPAVLQSSGLYSLESVVTVPSSSLGTQTYICNVNHKPSNTKVDKKVEPKSCTDWSPYADQSIKVRISLKSALGDKAYEWNDNEMYLFRSSVAYAMRQYFLKVKNQMILFGEEDVRVANLKPRISFNFFVTAPKNVSDIIPRTEVEKAIRMSRSRINDAFRLNDNSLEFLGIQPTLGPPNQPPVSTSTSPTRSMAPGAVHLPQPVSTRQAVVTQEPSLTVSPGGTVTLTCGSSTGAVTTSNYANWVQKKPGQAFRGLIGGTNKRAPGTPARFSGSLLGGKAALTLSGAQPEDEAEYYCALWYSNLWVFGGGTKLTVLSSASTKGPSVFPLAPSSKSTSGGTAALGCLVKDYFPEPVTVSWNSGALTSGVHTFPAVLQSSGLYSLKSVVTVPSSSLGTQTYICNVNHKPSNTKVDKKVEPKSCGGGSGGGGSREGPELSPDDPAGLLDLRQGMFAQLVAQNVLLIDGPLSWYSDPGLAGVSLTGGLSYKEDTKELVVAKAGVYYVFFQLELRRVVAGEGSGSVSLALHLQPLRSAAGAAALALTVDLPPASSEARNSAFGFQGRLLHLSAGQRLGVHLHTEARARHAWQLTQGATVLGLFRVTPEIPAGLPSPRSEGGGSGGGGSREGPELSPDDPAGLLDLRQGMFAQLVAQNVLLIDGPLSWYSDPGLAGVSLTGGLSYKEDTKELVVAKAGVYYVFFQLELRRVVAGEGSGSVSLALHLQPLRSAAGAAALALTVDLPPASSEARNSAFGFQGRLLHLSAGQRLGVHLHTEARARHAWQLTQGATVLGLFRVTPEIPAGLPSPRSEGGGSGGGGSREGPELSPDDPAGLLDLRQGMFAQLVAQNVLLIDGPLSWYSDPGLAGVSLTGGLSYKEDTKELVVAKAGVYYVFFQLELRRVVAGEGSGSVSLALHLQPLRSAAGAAALALTVDLPPASSEARNSAFGFQGRLLHLSAGQRLGVHLHTEARARHAWQLTQGATVLGLFRVTPEIPAGLPSPRSE

SEQ ID NO: 5055 - protein, 1185 aa, synthetic construct
  REGION 1..1185: note = Cg_VH-CH1/Q39K/S183E/CLD201/hole/PGLALA/RF/41BBL
QVQLVQSGAEVKKPGASVKVSCKASGYTFTEFGMNWVRKAPGQGLEWMGWINTKTGEATYVEEFKGRVTFTTDTSTSTAYMELRSLRSDDTAVYYCARWDFAYYVEAMDYWGQGTTVTVSSASTKGPSVFPLAPSSKSTSGGTAALGCLVKDYFPEPVTVSWNSGALTSGVHTFPAVLQSSGLYSLESVVTVPSSSLGTQTYICNVNHKPSNTKVDKKVEPKSCTDWSPYADQSIKVRISLKSALGDKAYEWNDNEMYLFRSSVAYAMRQYFLKVKNQMILFGEEDVRVANLKPRISFNFFVTAPKNVSDIIPRTEVEKAIRMSRSRINDAFRLNDNSLEFLGIQPTLGPPNQPPVSTSTSPTRSMAPGAVHLPQPVSTRDKTHTCPPCPAPEAAGGPSVFLFPPKPKDTLMISRTPEVTCVVVDVSHEDPEVKFNWYVDGVEVHNAKTKPREEQYNSTYRVVSVLTVLHQDWLNGKEYKCKVSNKALGAPIEKTISKAKGQPREPQVCTLPPSRDELTKNQVSLSCAVKGFYPSDIAVEWESNGQPENNYKTTPPVLDSDGSFFLVSKLTVDKSRWQQGNVFSCSVMHEALHNRFTQKSLSLSPGGGGSGGGGSREGPELSPDDPAGLLDLRQGMFAQLVAQNVLLIDGPLSWYSDPGLAGVSLTGGLSYKEDTKELVVAKAGVYYVFFQLELRRVVAGEGSGSVSLALHLQPLRSAAGAAALALTVDLPPASSEARNSAFGFQGRLLHLSAGQRLGVHLHTEARARHAWQLTQGATVLGLFRVTPEIPAGLPSPRSEGGGSGGGGSREGPELSPDDPAGLLDLRQGMFAQLVAQNVLLIDGPLSWYSDPGLAGVSLTGGLSYKEDTKELVVAKAGVYYVFFQLELRRVVAGEGSGSVSLALHLQPLRSAAGAAALALTVDLPPASSEARNSAFGFQGRLLHLSAGQRLGVHLHTEARARHAWQLTQGATVLGLFRVTPEIPAGLPSPRSEGGGSGGGGSREGPELSPDDPAGLLDLRQGMFAQLVAQNVLLIDGPLSWYSDPGLAGVSLTGGLSYKEDTKELVVAKAGVYYVFFQLELRRVVAGEGSGSVSLALHLQPLRSAAGAAALALTVDLPPASSEARNSAFGFQGRLLHLSAGQRLGVHLHTEARARHAWQLTQGATVLGLFRVTPEIPAGLPSPRSE

SEQ ID NO: 5056 - protein, 606 aa, synthetic construct
  REGION 1..606: note = Cg_VH-CH1/Q39K/S183E/CLD201/hole/PGLALA/RF
QVQLVQSGAEVKKPGASVKVSCKASGYTFTEFGMNWVRKAPGQGLEWMGWINTKTGEATYVEEFKGRVTFTTDTSTSTAYMELRSLRSDDTAVYYCARWDFAYYVEAMDYWGQGTTVTVSSASTKGPSVFPLAPSSKSTSGGTAALGCLVKDYFPEPVTVSWNSGALTSGVHTFPAVLQSSGLYSLESVVTVPSSSLGTQTYICNVNHKPSNTKVDKKVEPKSCTDWSPYADQSIKVRISLKSALGDKAYEWNDNEMYLFRSSVAYAMRQYFLKVKNQMILFGEEDVRVANLKPRISFNFFVTAPKNVSDIIPRTEVEKAIRMSRSRINDAFRLNDNSLEFLGIQPTLGPPNQPPVSTSTSPTRSMAPGAVHLPQPVSTRDKTHTCPPCPAPEAAGGPSVFLFPPKPKDTLMISRTPEVTCVVVDVSHEDPEVKFNWYVDGVEVHNAKTKPREEQYNSTYRVVSVLTVLHQDWLNGKEYKCKVSNKALGAPIEKTISKAKGQPREPQVCTLPPSRDELTKNQVSLSCAVKGFYPSDIAVEWESNGQPENNYKTTPPVLDSDGSFFLVSKLTVDKSRWQQGNVFSCSVMHEALHNRFTQKSLSLSPG

SEQ ID NO: 5057 - protein, 594 aa, synthetic construct
  REGION 1..594: note = Cg_VH-CH1/Q39K/S183E/CLD201/Sp34_VK-CH1/Q38E/S183K
QVQLVQSGAEVKKPGASVKVSCKASGYTFTEFGMNWVRKAPGQGLEWMGWINTKTGEATYVEEFKGRVTFTTDTSTSTAYMELRSLRSDDTAVYYCARWDFAYYVEAMDYWGQGTTVTVSSASTKGPSVFPLAPSSKSTSGGTAALGCLVKDYFPEPVTVSWNSGALTSGVHTFPAVLQSSGLYSLESVVTVPSSSLGTQTYICNVNHKPSNTKVDKKVEPKSCTDWSPYADQSIKVRISLKSALGDKAYEWNDNEMYLFRSSVAYAMRQYFLKVKNQMILFGEEDVRVANLKPRISFNFFVTAPKNVSDIIPRTEVEKAIRMSRSRINDAFRLNDNSLEFLGIQPTLGPPNQPPVSTSTSPTRSMAPGAVHLPQPVSTRQAVVTQEPSLTVSPGGTVTLTCGSSTGAVTTSNYANWVQEKPGQAFRGLIGGTNKRAPGTPARFSGSLLGGKAALTLSGAQPEDEAEYYCALWYSNLWVFGGGTKLTVLSSASTKGPSVFPLAPSSKSTSGGTAALGCLVKDYFPEPVTVSWNSGALTSGVHTFPAVLQSSGLYSLKSVVTVPSSSLGTQTYICNVNHKPSNTKVDKKVEPKSC

SEQ ID NO: 5058 - protein, 594 aa, synthetic construct
  REGION 1..594: note = Cg_VH-CH1/Q39K/S183E/CLD201/Sp34_VK-CH1/Q38K/S183K
QVQLVQSGAEVKKPGASVKVSCKASGYTFTEFGMNWVRKAPGQGLEWMGWINTKTGEATYVEEFKGRVTFTTDTSTSTAYMELRSLRSDDTAVYYCARWDFAYYVEAMDYWGQGTTVTVSSASTKGPSVFPLAPSSKSTSGGTAALGCLVKDYFPEPVTVSWNSGALTSGVHTFPAVLQSSGLYSLESVVTVPSSSLGTQTYICNVNHKPSNTKVDKKVEPKSCTDWSPYADQSIKVRISLKSALGDKAYEWNDNEMYLFRSSVAYAMRQYFLKVKNQMILFGEEDVRVANLKPRISFNFFVTAPKNVSDIIPRTEVEKAIRMSRSRINDAFRLNDNSLEFLGIQPTLGPPNQPPVSTSTSPTRSMAPGAVHLPQPVSTRQAVVTQEPSLTVSPGGTVTLTCGSSTGAVTTSNYANWVQKKPGQAFRGLIGGTNKRAPGTPARFSGSLLGGKAALTLSGAQPEDEAEYYCALWYSNLWVFGGGTKLTVLSSASTKGPSVFPLAPSSKSTSGGTAALGCLVKDYFPEPVTVSWNSGALTSGVHTFPAVLQSSGLYSLKSVVTVPSSSLGTQTYICNVNHKPSNTKVDKKVEPKSC

SEQ ID NO: 5059 - protein, 1173 aa, synthetic construct
  REGION 1..1173: note Cg_VH-CH1/Q39K/S183E/CLD201/Sp34_VK-CH1/Q38E/S183K/41BBL
QVQLVQSGAEVKKPGASVKVSCKASGYTFTEFGMNWVRKAPGQGLEWMGWINTKTGEATYVEEFKGRVTFTTDTSTSTAYMELRSLRSDDTAVYYCARWDFAYYVEAMDYWGQGTTVTVSSASTKGPSVFPLAPSSKSTSGGTAALGCLVKDYFPEPVTVSWNSGALTSGVHTFPAVLQSSGLYSLESVVTVPSSSLGTQTYICNVNHKPSNTKVDKKVEPKSCTDWSPYADQSIKVRISLKSALGDKAYEWNDNEMYLFRSSVAYAMRQYFLKVKNQMILFGEEDVRVANLKPRISFNFFVTAPKNVSDIIPRTEVEKAIRMSRSRINDAFRLNDNSLEFLGIQPTLGPPNQPPVSTSTSPTRSMAPGAVHLPQPVSTRQAVVTQEPSLTVSPGGTVTLTCGSSTGAVTTSNYANWVQEKPGQAFRGLIGGTNKRAPGTPARFSGSLLGGKAALTLSGAQPEDEAEYYCALWYSNLWVFGGGTKLTVLSSASTKGPSVFPLAPSSKSTSGGTAALGCLVKDYFPEPVTVSWNSGALTSGVHTFPAVLQSSGLYSLKSVVTVPSSSLGTQTYICNVNHKPSNTKVDKKVEPKSCGGGSGGGGSREGPELSPDDPAGLLDLRQGMFAQLVAQNVLLIDGPLSWYSDPGLAGVSLTGGLSYKEDTKELVVAKAGVYYVFFQLELRRVVAGEGSGSVSLALHLQPLRSAAGAAALALTVDLPPASSEARNSAFGFQGRLLHLSAGQRLGVHLHTEARARHAWQLTQGATVLGLFRVTPEIPAGLPSPRSEGGGSGGGGSREGPELSPDDPAGLLDLRQGMFAQLVAQNVLLIDGPLSWYSDPGLAGVSLTGGLSYKEDTKELVVAKAGVYYVFFQLELRRVVAGEGSGSVSLALHLQPLRSAAGAAALALTVDLPPASSEARNSAFGFQGRLLHLSAGQRLGVHLHTEARARHAWQLTQGATVLGLFRVTPEIPAGLPSPRSEGGGSGGGGSREGPELSPDDPAGLLDLRQGMFAQLVAQNVLLIDGPLSWYSDPGLAGVSLTGGLSYKEDTKELVVAKAGVYYVFFQLELRRVVAGEGSGSVSLALHLQPLRSAAGAAALALTVDLPPASSEARNSAFGFQGRLLHLSAGQRLGVHLHTEARARHAWQLTQGATVLGLFRVTPEIPAGLPSPRSE

SEQ ID NO: 5060 - protein, 1173 aa, synthetic construct
  REGION 1..1173: note Cg_VH-CH1/Q39K/S183E/CLD201/Sp34_VK-CH1/Q38K/S183K/41BBL
QVQLVQSGAEVKKPGASVKVSCKASGYTFTEFGMNWVRKAPGQGLEWMGWINTKTGEATYVEEFKGRVTFTTDTSTSTAYMELRSLRSDDTAVYYCARWDFAYYVEAMDYWGQGTTVTVSSASTKGPSVFPLAPSSKSTSGGTAALGCLVKDYFPEPVTVSWNSGALTSGVHTFPAVLQSSGLYSLESVVTVPSSSLGTQTYICNVNHKPSNTKVDKKVEPKSCTDWSPYADQSIKVRISLKSALGDKAYEWNDNEMYLFRSSVAYAMRQYFLKVKNQMILFGEEDVRVANLKPRISFNFFVTAPKNVSDIIPRTEVEKAIRMSRSRINDAFRLNDNSLEFLGIQPTLGPPNQPPVSTSTSPTRSMAPGAVHLPQPVSTRQAVVTQEPSLTVSPGGTVTLTCGSSTGAVTTSNYANWVQKKPGQAFRGLIGGTNKRAPGTPARFSGSLLGGKAALTLSGAQPEDEAEYYCALWYSNLWVFGGGTKLTVLSSASTKGPSVFPLAPSSKSTSGGTAALGCLVKDYFPEPVTVSWNSGALTSGVHTFPAVLQSSGLYSLKSVVTVPSSSLGTQTYICNVNHKPSNTKVDKKVEPKSCGGGSGGGGSREGPELSPDDPAGLLDLRQGMFAQLVAQNVLLIDGPLSWYSDPGLAGVSLTGGLSYKEDTKELVVAKAGVYYVFFQLELRRVVAGEGSGSVSLALHLQPLRSAAGAAALALTVDLPPASSEARNSAFGFQGRLLHLSAGQRLGVHLHTEARARHAWQLTQGATVLGLFRVTPEIPAGLPSPRSEGGGSGGGGSREGPELSPDDPAGLLDLRQGMFAQLVAQNVLLIDGPLSWYSDPGLAGVSLTGGLSYKEDTKELVVAKAGVYYVFFQLELRRVVAGEGSGSVSLALHLQPLRSAAGAAALALTVDLPPASSEARNSAFGFQGRLLHLSAGQRLGVHLHTEARARHAWQLTQGATVLGLFRVTPEIPAGLPSPRSEGGGSGGGGSREGPELSPDDPAGLLDLRQGMFAQLVAQNVLLIDGPLSWYSDPGLAGVSLTGGLSYKEDTKELVVAKAGVYYVFFQLELRRVVAGEGSGSVSLALHLQPLRSAAGAAALALTVDLPPASSEARNSAFGFQGRLLHLSAGQRLGVHLHTEARARHAWQLTQGATVLGLFRVTPEIPAGLPSPRSE

SEQ ID NO: 5061 - protein, 213 aa, synthetic construct; identical to SEQ ID NO: 735
  REGION 1..213: note = R_VK-CK/Q38E/V133K

SEQ ID NO: 5062 - protein, 232 aa, synthetic construct; identical to SEQ ID NO: 698
  REGION 1..232: note = Sp34_VH-CK/N84S/Q39K/V133E

SEQ ID NO: 5063 - protein, 232 aa, synthetic construct; identical to SEQ ID NO: 699
  REGION 1..232: note = Sp34_VH-CK/N84S/Q39E/V133E

SEQ ID NO: 5064 - protein, 811 aa, synthetic construct
  REGION 1..811: note = Sp34_VH-CK/N84S/Q39K/V133E/41BBL
EVQLLESGGGLVQPGGSLRLSCAASGFTFSTYAMNWVRKAPGKGLEWVSRIRSKYNNYATYYADSVKGRFTISRDDSKNTLYLQMSSLRAEDTAVYYCVRHGNFGNSYVSWFAYWGQGTLVTVSSASVAAPSVFIFPPSDEQLKSGTASVECLLNNFYPREAKVQWKVDNALQSGNSQESVTEQDSKDSTYSLSSTLTLSKADYEKHKVYACEVTHQGLSSPVTKSFNRGECGGGSGGGGSREGPELSPDDPAGLLDLRQGMFAQLVAQNVLLIDGPLSWYSDPGLAGVSLTGGLSYKEDTKELVVAKAGVYYVFFQLELRRVVAGEGSGSVSLALHLQPLRSAAGAAALALTVDLPPASSEARNSAFGFQGRLLHLSAGQRLGVHLHTEARARHAWQLTQGATVLGLFRVTPEIPAGLPSPRSEGGGSGGGGSREGPELSPDDPAGLLDLRQGMFAQLVAQNVLLIDGPLSWYSDPGLAGVSLTGGLSYKEDTKELVVAKAGVYYVFFQLELRRVVAGEGSGSVSLALHLQPLRSAAGAAALALTVDLPPASSEARNSAFGFQGRLLHLSAGQRLGVHLHTEARARHAWQLTQGATVLGLFRVTPEIPAGLPSPRSEGGGSGGGGSREGPELSPDDPAGLLDLRQGMFAQLVAQNVLLIDGPLSWYSDPGLAGVSLTGGLSYKEDTKELVVAKAGVYYVFFQLELRRVVAGEGSGSVSLALHLQPLRSAAGAAALALTVDLPPASSEARNSAFGFQGRLLHLSAGQRLGVHLHTEARARHAWQLTQGATVLGLFRVTPEIPAGLPSPRSE

SEQ ID NO: 5065 - protein, 811 aa, synthetic construct
  REGION 1..811: note = Sp34_VH-CK/N84S/Q39E/V133E/41BBL
EVQLLESGGGLVQPGGSLRLSCAASGFTFSTYAMNWVREAPGKGLEWVSRIRSKYNNYATYYADSVKGRFTISRDDSKNTLYLQMSSLRAEDTAVYYCVRHGNFGNSYVSWFAYWGQGTLVTVSSASVAAPSVFIFPPSDEQLKSGTASVECLLNNFYPREAKVQWKVDNALQSGNSQESVTEQDSKDSTYSLSSTLTLSKADYEKHKVYACEVTHQGLSSPVTKSFNRGECGGGSGGGGSREGPELSPDDPAGLLDLRQGMFAQLVAQNVLLIDGPLSWYSDPGLAGVSLTGGLSYKEDTKELVVAKAGVYYVFFQLELRRVVAGEGSGSVSLALHLQPLRSAAGAAALALTVDLPPASSEARNSAFGFQGRLLHLSAGQRLGVHLHTEARARHAWQLTQGATVLGLFRVTPEIPAGLPSPRSEGGGSGGGGSREGPELSPDDPAGLLDLRQGMFAQLVAQNVLLIDGPLSWYSDPGLAGVSLTGGLSYKEDTKELVVAKAGVYYVFFQLELRRVVAGEGSGSVSLALHLQPLRSAAGAAALALTVDLPPASSEARNSAFGFQGRLLHLSAGQRLGVHLHTEARARHAWQLTQGATVLGLFRVTPEIPAGLPSPRSEGGGSGGGGSREGPELSPDDPAGLLDLRQGMFAQLVAQNVLLIDGPLSWYSDPGLAGVSLTGGLSYKEDTKELVVAKAGVYYVFFQLELRRVVAGEGSGSVSLALHLQPLRSAAGAAALALTVDLPPASSEARNSAFGFQGRLLHLSAGQRLGVHLHTEARARHAWQLTQGATVLGLFRVTPEIPAGLPSPRSE

SEQ ID NO: 5066 - protein, 214 aa, synthetic construct; identical to SEQ ID NO: 5015
  REGION 1..214: note = Tr_VK-CK/Q38E/V133K

SEQ ID NO: 5067 - protein, 215 aa, synthetic construct
  REGION 1..215: note = Cg_VK-CK/Q38E/V133K
DIQMTQSPSSLSASVGDRVTITCKASAAVGTYVAWYQEKPGKAPKLLIYSASYRKRGVPSRFSGSGSGTDFTLTISSLQPEDFATYYCHQYYTYPLFTFGQGTKLEIKRTVAAPSVFIFPPSDEQLKSGTASVKCLLNNFYPREAKVQWKVDNALQSGNSQESVTEQDSKDSTYSLSSTLTLSKADYEKHKVYACEVTHQGLSSPVTKSFNRGEC

SEQ ID NO: 5068 - protein, 221 aa, synthetic construct; identical to SEQ ID NO: 706
  REGION 1..221: note = Fc6/knob/PGLALA

SEQ ID NO: 5069 - protein, 800 aa, synthetic construct
  REGION 1..800: note = Fc6/knob/PGLALA/41BBL
CPPCPAPEAAGGPSVFLFPPKPKDTLMISRTPEVTCVVVDVSHEDPEVKFNWYVDGVEVHNAKTKPREEQYNSTYRVVSVLTVLHQDWLNGKEYKCKVSNKALGAPIEKTISKAKGQPREPQVYTLPPCRDELTKNQVSLWCLVKGFYPSDIAVEWESNGQPENNYKTTPPVLDSDGSFFLYSKLTVDKSRWQQGNVFSCSVMHEALHNHYTQKSLSLSPGGGGSGGGGSREGPELSPDDPAGLLDLRQGMFAQLVAQNVLLIDGPLSWYSDPGLAGVSLTGGLSYKEDTKELVVAKAGVYYVFFQLELRRVVAGEGSGSVSLALHLQPLRSAAGAAALALTVDLPPASSEARNSAFGFQGRLLHLSAGQRLGVHLHTEARARHAWQLTQGATVLGLFRVTPEIPAGLPSPRSEGGGSGGGGSREGPELSPDDPAGLLDLRQGMFAQLVAQNVLLIDGPLSWYSDPGLAGVSLTGGLSYKEDTKELVVAKAGVYYVFFQLELRRVVAGEGSGSVSLALHLQPLRSAAGAAALALTVDLPPASSEARNSAFGFQGRLLHLSAGQRLGVHLHTEARARHAWQLTQGATVLGLFRVTPEIPAGLPSPRSEGGGSGGGGSREGPELSPDDPAGLLDLRQGMFAQLVAQNVLLIDGPLSWYSDPGLAGVSLTGGLSYKEDTKELVVAKAGVYYVFFQLELRRVVAGEGSGSVSLALHLQPLRSAAGAAALALTVDLPPASSEARNSAFGFQGRLLHLSAGQRLGVHLHTEARARHAWQLTQGATVLGLFRVTPEIPAGLPSPRSE

SEQ ID NO: 5070 - protein, 500 aa, synthetic construct
  REGION 1..500: note = SIRPA/CLD201/hole/RF
EEELQVIQPDKSVSVAAGESAILHCTVTSLIPVGPIQWFRGAGPARELIYNQKEGHFPRVTTVSESTKRENMDFSISISNITPADAGTYYCVKFRKGSPDTEFKSGAGTELSVRAKPSTDWSPYADQSIKVRISLKSALGDKAYEWNDNEMYLFRSSVAYAMRQYFLKVKNQMILFGEEDVRVANLKPRISFNFFVTAPKNVSDIIPRTEVEKAIRMSRSRINDAFRLNDNSLEFLGIQPTLGPPNQPPVSTSTSPTRSMAPGAVHLPQPVSTRDKTHTCPPCPAPELLGGPSVFLFPPKPKDTLMISRTPEVTCVVVDVSHEDPEVKFNWYVDGVEVHNAKTKPREEQYNSTYRVVSVLTVLHQDWLNGKEYKCKVSNKALPAPIEKTISKAKGQPREPQVCTLPPSRDELTKNQVSLSCAVKGFYPSDIAVEWESNGQPENNYKTTPPVLDSDGSFFLVSKLTVDKSRWQQGNVFSCSVMHEALHNRFTQKSLSLSPG

SEQ ID NO: 5071 - protein, 523 aa, synthetic construct
  REGION 1..523: note = SIRPA201/CLD201/hole/RF
EEELQVIQPDKSVSVAAGESAILHCTVTSLIPVGPIQWFRGAGPARELIYNQKEGHFPRVTTVSESTKRENMDFSISISNITPADAGTYYCVKFRKGSPDTEFKSGAGTELSVRAKPSTSTSPTRSMAPGAVHLPQPVSTRTDWSPYADQSIKVRISLKSALGDKAYEWNDNEMYLFRSSVAYAMRQYFLKVKNQMILFGEEDVRVANLKPRISFNFFVTAPKNVSDIIPRTEVEKAIRMSRSRINDAFRLNDNSLEFLGIQPTLGPPNQPPVSTSTSPTRSMAPGAVHLPQPVSTRDKTHTCPPCPAPELLGGPSVFLFPPKPKDTLMISRTPEVTCVVVDVSHEDPEVKFNWYVDGVEVHNAKTKPREEQYNSTYRVVSVLTVLHQDWLNGKEYKCKVSNKALPAPIEKTISKAKGQPREPQVCTLPPSRDELTKNQVSLSCAVKGFYPSDIAVEWESNGQPENNYKTTPPVLDSDGSFFLVSKLTVDKSRWQQGNVFSCSVMHEALHNRFTQKSLSLSPG

SEQ ID NO: 5072 - protein, 450 aa, synthetic construct; identical to SEQ ID NO: 4734
  REGION 1..450: note = R_VH-CH1/knob

SEQ ID NO: 5073 - protein, 451 aa, synthetic construct; identical to SEQ ID NO: 644
  REGION 1..451: note = Da_VH-CH1/N84S/knob

SEQ ID NO: 5074 - protein, 449 aa, synthetic construct
  REGION 1..449: note = Tr_VH-CH1/N84S/knob
EVQLVESGGGLVQPGGSLRLSCAASGFNIKDTYIHWVRQAPGKGLEWVARIYPTNGYTRYADSVKGRFTISADTSKNTAYLQMSSLRAEDTAVYYCSRWGGDGFYAMDYWGQGTLVTVSSASTKGPSVFPLAPSSKSTSGGTAALGCLVKDYFPEPVTVSWNSGALTSGVHTFPAVLQSSGLYSLSSVVTVPSSSLGTQTYICNVNHKPSNTKVDKKVEPKSCDKTHTCPPCPAPELLGGPSVFLFPPKPKDTLMISRTPEVTCVVVDVSHEDPEVKFNWYVDGVEVHNAKTKPREEQYNSTYRVVSVLTVLHQDWLNGKEYKCKVSNKALPAPIEKTISKAKGQPREPQVYTLPPCRDELTKNQVSLWCLVKGFYPSDIAVEWESNGQPENNYKTTPPVLDSDGSFFLYSKLTVDKSRWQQGNVFSCSVMHEALHNHYTQKSLSLSPG

SEQ ID NO: 5075 - protein, 448 aa, synthetic construct
  REGION 1..448: note = Ce_VH-CH1/N84S/knob
QVQLKQSGPGLVQPSQSLSITCTVSGFSLTNYGVHWVRQSPGKGLEWLGVIWSGGNTDYNTPFTSRLSINKDNSKSQVFFKMSSLQSNDTAIYYCARALTYYDYEFAYWGQGTLVTVSAASTKGPSVFPLAPSSKSTSGGTAALGCLVKDYFPEPVTVSWNSGALTSGVHTFPAVLQSSGLYSLSSVVTVPSSSLGTQTYICNVNHKPSNTKVDKKVEPKSCDKTHTCPPCPAPELLGGPSVFLFPPKPKDTLMISRTPEVTCVVVDVSHEDPEVKFNWYVDGVEVHNAKTKPREEQYNSTYRVVSVLTVLHQDWLNGKEYKCKVSNKALPAPIEKTISKAKGQPREPQVYTLPPCRDELTKNQVSLWCLVKGFYPSDIAVEWESNGQPENNYKTTPPVLDSDGSFFLYSKLTVDKSRWQQGNVFSCSVMHEALHNHYTQKSLSLSPG

SEQ ID NO: 5076 - protein, 450 aa, synthetic construct
  REGION 1..450: note = Cg_VH-CH1/N84S/knob
QVQLVQSGAEVKKPGASVKVSCKASGYTFTEFGMNWVRQAPGQGLEWMGWINTKTGEATYVEEFKGRVTFTTDTSTSTAYMELRSLRSDDTAVYYCARWDFAYYVEAMDYWGQGTTVTVSSASTKGPSVFPLAPSSKSTSGGTAALGCLVKDYFPEPVTVSWNSGALTSGVHTFPAVLQSSGLYSLSSVVTVPSSSLGTQTYICNVNHKPSNTKVDKKVEPKSCDKTHTCPPCPAPELLGGPSVFLFPPKPKDTLMISRTPEVTCVVVDVSHEDPEVKFNWYVDGVEVHNAKTKPREEQYNSTYRVVSVLTVLHQDWLNGKEYKCKVSNKALPAPIEKTISKAKGQPREPQVYTLPPCRDELTKNQVSLWCLVKGFYPSDIAVEWESNGQPENNYKTTPPVLDSDGSFFLYSKLTVDKSRWQQGNVFSCSVMHEALHNHYTQKSLSLSPG

SEQ ID NO: 5077 - protein, 977 aa, synthetic construct
  REGION 1..977: note = SIRPA/CLD201/hole/RF/CD40L
EEELQVIQPDKSVSVAAGESAILHCTVTSLIPVGPIQWFRGAGPARELIYNQKEGHFPRVTTVSESTKRENMDFSISISNITPADAGTYYCVKFRKGSPDTEFKSGAGTELSVRAKPSTDWSPYADQSIKVRISLKSALGDKAYEWNDNEMYLFRSSVAYAMRQYFLKVKNQMILFGEEDVRVANLKPRISFNFFVTAPKNVSDIIPRTEVEKAIRMSRSRINDAFRLNDNSLEFLGIQPTLGPPNQPPVSTSTSPTRSMAPGAVHLPQPVSTRDKTHTCPPCPAPELLGGPSVFLFPPKPKDTLMISRTPEVTCVVVDVSHEDPEVKFNWYVDGVEVHNAKTKPREEQYNSTYRVVSVLTVLHQDWLNGKEYKCKVSNKALPAPIEKTISKAKGQPREPQVCTLPPSRDELTKNQVSLSCAVKGFYPSDIAVEWESNGQPENNYKTTPPVLDSDGSFFLVSKLTVDKSRWQQGNVFSCSVMHEALHNRFTQKSLSLSPGGGGSGGGGSEMQKGDQNPQIAAHVISEASSKTTSVLQWAEKGYYTMSNNLVTLENGKQLTVKRQGLYYIYAQVTFCSNREASSQAPFIASLCLKSPGRFERILLRAANTHSSAKPCGQQSIHLGGVFELQPGASVFVNVTDPSQVSHGTGFTSFGLLKLGGGSGGGGSEMQKGDQNPQIAAHVISEASSKTTSVLQWAEKGYYTMSNNLVTLENGKQLTVKRQGLYYIYAQVTFCSNREASSQAPFIASLCLKSPGRFERILLRAANTHSSAKPCGQQSIHLGGVFELQPGASVFVNVTDPSQVSHGTGFTSFGLLKLGGGSGGGGSEMQKGDQNPQIAAHVISEASSKTTSVLQWAEKGYYTMSNNLVTLENGKQLTVKRQGLYYIYAQVTFCSNREASSQAPFIASLCLKSPGRFERILLRAANTHSSAKPCGQQSIHLGGVFELQPGASVFVNVTDPSQVSHGTGFTSFGLLKL

SEQ ID NO: 5078 - protein, 1000 aa, synthetic construct
  REGION 1..1000: note = SIRPA201/CLD201/hole/RF/CD40L
EEELQVIQPDKSVSVAAGESAILHCTVTSLIPVGPIQWFRGAGPARELIYNQKEGHFPRVTTVSESTKRENMDFSISISNITPADAGTYYCVKFRKGSPDTEFKSGAGTELSVRAKPSTSTSPTRSMAPGAVHLPQPVSTRTDWSPYADQSIKVRISLKSALGDKAYEWNDNEMYLFRSSVAYAMRQYFLKVKNQMILFGEEDVRVANLKPRISFNFFVTAPKNVSDIIPRTEVEKAIRMSRSRINDAFRLNDNSLEFLGIQPTLGPPNQPPVSTSTSPTRSMAPGAVHLPQPVSTRDKTHTCPPCPAPELLGGPSVFLFPPKPKDTLMISRTPEVTCVVVDVSHEDPEVKFNWYVDGVEVHNAKTKPREEQYNSTYRVVSVLTVLHQDWLNGKEYKCKVSNKALPAPIEKTISKAKGQPREPQVCTLPPSRDELTKNQVSLSCAVKGFYPSDIAVEWESNGQPENNYKTTPPVLDSDGSFFLVSKLTVDKSRWQQGNVFSCSVMHEALHNRFTQKSLSLSPGGGGSGGGGSEMQKGDQNPQIAAHVISEASSKTTSVLQWAEKGYYTMSNNLVTLENGKQLTVKRQGLYYIYAQVTFCSNREASSQAPFIASLCLKSPGRFERILLRAANTHSSAKPCGQQSIHLGGVFELQPGASVFVNVTDPSQVSHGTGFTSFGLLKLGGGSGGGGSEMQKGDQNPQIAAHVISEASSKTTSVLQWAEKGYYTMSNNLVTLENGKQLTVKRQGLYYIYAQVTFCSNREASSQAPFIASLCLKSPGRFERILLRAANTHSSAKPCGQQSIHLGGVFELQPGASVFVNVTDPSQVSHGTGFTSFGLLKLGGGSGGGGSEMQKGDQNPQIAAHVISEASSKTTSVLQWAEKGYYTMSNNLVTLENGKQLTVKRQGLYYIYAQVTFCSNREASSQAPFIASLCLKSPGRFERILLRAANTHSSAKPCGQQSIHLGGVFELQPGASVFVNVTDPSQVSHGTGFTSFGLLKL

SEQ ID NO: 5079 - protein, 927 aa, synthetic construct
  REGION 1..927: note = R_VH-CH1/knob/CD40L
QVQLQQPGAELVKPGASVKMSCKASGYTFTSYNMHWVKQTPGRGLEWIGAIYPGNGDTSYNQKFKGKATLTADKSSSTAYMQLSSLTSEDSAVYYCARSTYYGGDWYFNVWGAGTTVTVSAASTKGPSVFPLAPSSKSTSGGTAALGCLVKDYFPEPVTVSWNSGALTSGVHTFPAVLQSSGLYSLSSVVTVPSSSLGTQTYICNVNHKPSNTKVDKKVEPKSCDKTHTCPPCPAPELLGGPSVFLFPPKPKDTLMISRTPEVTCVVVDVSHEDPEVKFNWYVDGVEVHNAKTKPREEQYNSTYRVVSVLTVLHQDWLNGKEYKCKVSNKALPAPIEKTISKAKGQPREPQVYTLPPCRDELTKNQVSLWCLVKGFYPSDIAVEWESNGQPENNYKTTPPVLDSDGSFFLYSKLTVDKSRWQQGNVFSCSVMHEALHNHYTQKSLSLSPGGGGSGGGGSEMQKGDQNPQIAAHVISEASSKTTSVLQWAEKGYYTMSNNLVTLENGKQLTVKRQGLYYIYAQVTFCSNREASSQAPFIASLCLKSPGRFERILLRAANTHSSAKPCGQQSIHLGGVFELQPGASVFVNVTDPSQVSHGTGFTSFGLLKLGGGSGGGGSEMQKGDQNPQIAAHVISEASSKTTSVLQWAEKGYYTMSNNLVTLENGKQLTVKRQGLYYIYAQVTFCSNREASSQAPFIASLCLKSPGRFERILLRAANTHSSAKPCGQQSIHLGGVFELQPGASVFVNVTDPSQVSHGTGFTSFGLLKLGGGSGGGGSEMQKGDQNPQIAAHVISEASSKTTSVLQWAEKGYYTMSNNLVTLENGKQLTVKRQGLYYIYAQVTFCSNREASSQAPFIASLCLKSPGRFERILLRAANTHSSAKPCGQQSIHLGGVFELQPGASVFVNVTDPSQVSHGTGFTSFGLLKL

SEQ ID NO: 5080 - protein, 928 aa, synthetic construct
  REGION 1..928: note = Da_VH-CH1/N84S/knob/CD40L
EVQLLESGGGLVQPGGSLRLSCAVSGFTFNSFAMSWVRQAPGKGLEWVSAISGSGGGTYYADSVKGRFTISRDNSKNTLYLQMSSLRAEDTAVYFCAKDKILWFGEPVFDYWGQGTLVTVSSASTKGPSVFPLAPSSKSTSGGTAALGCLVKDYFPEPVTVSWNSGALTSGVHTFPAVLQSSGLYSLSSVVTVPSSSLGTQTYICNVNHKPSNTKVDKKVEPKSCDKTHTCPPCPAPELLGGPSVFLFPPKPKDTLMISRTPEVTCVVVDVSHEDPEVKFNWYVDGVEVHNAKTKPREEQYNSTYRVVSVLTVLHQDWLNGKEYKCKVSNKALPAPIEKTISKAKGQPREPQVYTLPPCRDELTKNQVSLWCLVKGFYPSDIAVEWESNGQPENNYKTTPPVLDSDGSFFLYSKLTVDKSRWQQGNVFSCSVMHEALHNHYTQKSLSLSPGGGGSGGGGSEMQKGDQNPQIAAHVISEASSKTTSVLQWAEKGYYTMSNNLVTLENGKQLTVKRQGLYYIYAQVTFCSNREASSQAPFIASLCLKSPGRFERILLRAANTHSSAKPCGQQSIHLGGVFELQPGASVFVNVTDPSQVSHGTGFTSFGLLKLGGGSGGGGSEMQKGDQNPQIAAHVISEASSKTTSVLQWAEKGYYTMSNNLVTLENGKQLTVKRQGLYYIYAQVTFCSNREASSQAPFIASLCLKSPGRFERILLRAANTHSSAKPCGQQSIHLGGVFELQPGASVFVNVTDPSQVSHGTGFTSFGLLKLGGGSGGGGSEMQKGDQNPQIAAHVISEASSKTTSVLQWAEKGYYTMSNNLVTLENGKQLTVKRQGLYYIYAQVTFCSNREASSQAPFIASLCLKSPGRFERILLRAANTHSSAKPCGQQSIHLGGVFELQPGASVFVNVTDPSQVSHGTGFTSFGLLKL

SEQ ID NO: 5081 - protein, 926 aa, synthetic construct
  REGION 1..926: note = Tr_VH-CH1/N84S/knob/CD40L
EVQLVESGGGLVQPGGSLRLSCAASGFNIKDTYIHWVRQAPGKGLEWVARIYPTNGYTRYADSVKGRFTISADTSKNTAYLQMSSLRAEDTAVYYCSRWGGDGFYAMDYWGQGTLVTVSSASTKGPSVFPLAPSSKSTSGGTAALGCLVKDYFPEPVTVSWNSGALTSGVHTFPAVLQSSGLYSLSSVVTVPSSSLGTQTYICNVNHKPSNTKVDKKVEPKSCDKTHTCPPCPAPELLGGPSVFLFPPKPKDTLMISRTPEVTCVVVDVSHEDPEVKFNWYVDGVEVHNAKTKPREEQYNSTYRVVSVLTVLHQDWLNGKEYKCKVSNKALPAPIEKTISKAKGQPREPQVYTLPPCRDELTKNQVSLWCLVKGFYPSDIAVEWESNGQPENNYKTTPPVLDSDGSFFLYSKLTVDKSRWQQGNVFSCSVMHEALHNHYTQKSLSLSPGGGGSGGGGSEMQKGDQNPQIAAHVISEASSKTTSVLQWAEKGYYTMSNNLVTLENGKQLTVKRQGLYYIYAQVTFCSNREASSQAPFIASLCLKSPGRFERILLRAANTHSSAKPCGQQSIHLGGVFELQPGASVFVNVTDPSQVSHGTGFTSFGLLKLGGGSGGGGSEMQKGDQNPQIAAHVISEASSKTTSVLQWAEKGYYTMSNNLVTLENGKQLTVKRQGLYYIYAQVTFCSNREASSQAPFIASLCLKSPGRFERILLRAANTHSSAKPCGQQSIHLGGVFELQPGASVFVNVTDPSQVSHGTGFTSFGLLKLGGGSGGGGSEMQKGDQNPQIAAHVISEASSKTTSVLQWAEKGYYTMSNNLVTLENGKQLTVKRQGLYYIYAQVTFCSNREASSQAPFIASLCLKSPGRFERILLRAANTHSSAKPCGQQSIHLGGVFELQPGASVFVNVTDPSQVSHGTGFTSFGLLKL

SEQ ID NO: 5082 - protein, 925 aa, synthetic construct
  REGION 1..925: note = Ce_VH-CH1/N84S/knob/CD40L
QVQLKQSGPGLVQPSQSLSITCTVSGFSLTNYGVHWVRQSPGKGLEWLGVIWSGGNTDYNTPFTSRLSINKDNSKSQVFFKMSSLQSNDTAIYYCARALTYYDYEFAYWGQGTLVTVSAASTKGPSVFPLAPSSKSTSGGTAALGCLVKDYFPEPVTVSWNSGALTSGVHTFPAVLQSSGLYSLSSVVTVPSSSLGTQTYICNVNHKPSNTKVDKKVEPKSCDKTHTCPPCPAPELLGGPSVFLFPPKPKDTLMISRTPEVTCVVVDVSHEDPEVKFNWYVDGVEVHNAKTKPREEQYNSTYRVVSVLTVLHQDWLNGKEYKCKVSNKALPAPIEKTISKAKGQPREPQVYTLPPCRDELTKNQVSLWCLVKGFYPSDIAVEWESNGQPENNYKTTPPVLDSDGSFFLYSKLTVDKSRWQQGNVFSCSVMHEALHNHYTQKSLSLSPGGGGSGGGGSEMQKGDQNPQIAAHVISEASSKTTSVLQWAEKGYYTMSNNLVTLENGKQLTVKRQGLYYIYAQVTFCSNREASSQAPFIASLCLKSPGRFERILLRAANTHSSAKPCGQQSIHLGGVFELQPGASVFVNVTDPSQVSHGTGFTSFGLLKLGGGSGGGGSEMQKGDQNPQIAAHVISEASSKTTSVLQWAEKGYYTMSNNLVTLENGKQLTVKRQGLYYIYAQVTFCSNREASSQAPFIASLCLKSPGRFERILLRAANTHSSAKPCGQQSIHLGGVFELQPGASVFVNVTDPSQVSHGTGFTSFGLLKLGGGSGGGGSEMQKGDQNPQIAAHVISEASSKTTSVLQWAEKGYYTMSNNLVTLENGKQLTVKRQGLYYIYAQVTFCSNREASSQAPFIASLCLKSPGRFERILLRAANTHSSAKPCGQQSIHLGGVFELQPGASVFVNVTDPSQVSHGTGFTSFGLLKL

SEQ ID NO: 5083 - protein, 927 aa, synthetic construct
  REGION 1..927: note = Cg_VH-CH1/N84S/knob/CD40L
QVQLVQSGAEVKKPGASVKVSCKASGYTFTEFGMNWVRQAPGQGLEWMGWINTKTGEATYVEEFKGRVTFTTDTSTSTAYMELRSLRSDDTAVYYCARWDFAYYVEAMDYWGQGTTVTVSSASTKGPSVFPLAPSSKSTSGGTAALGCLVKDYFPEPVTVSWNSGALTSGVHTFPAVLQSSGLYSLSSVVTVPSSSLGTQTYICNVNHKPSNTKVDKKVEPKSCDKTHTCPPCPAPELLGGPSVFLFPPKPKDTLMISRTPEVTCVVVDVSHEDPEVKFNWYVDGVEVHNAKTKPREEQYNSTYRVVSVLTVLHQDWLNGKEYKCKVSNKALPAPIEKTISKAKGQPREPQVYTLPPCRDELTKNQVSLWCLVKGFYPSDIAVEWESNGQPENNYKTTPPVLDSDGSFFLYSKLTVDKSRWQQGNVFSCSVMHEALHNHYTQKSLSLSPGGGGSGGGGSEMQKGDQNPQIAAHVISEASSKTTSVLQWAEKGYYTMSNNLVTLENGKQLTVKRQGLYYIYAQVTFCSNREASSQAPFIASLCLKSPGRFERILLRAANTHSSAKPCGQQSIHLGGVFELQPGASVFVNVTDPSQVSHGTGFTSFGLLKLGGGSGGGGSEMQKGDQNPQIAAHVISEASSKTTSVLQWAEKGYYTMSNNLVTLENGKQLTVKRQGLYYIYAQVTFCSNREASSQAPFIASLCLKSPGRFERILLRAANTHSSAKPCGQQSIHLGGVFELQPGASVFVNVTDPSQVSHGTGFTSFGLLKLGGGSGGGGSEMQKGDQNPQIAAHVISEASSKTTSVLQWAEKGYYTMSNNLVTLENGKQLTVKRQGLYYIYAQVTFCSNREASSQAPFIASLCLKSPGRFERILLRAANTHSSAKPCGQQSIHLGGVFELQPGASVFVNVTDPSQVSHGTGFTSFGLLKL

SEQ ID NO: 5084 - protein, 213 aa, synthetic construct; identical to SEQ ID NO: 1
  REGION 1..213: note = R_VK-CK

SEQ ID NO: 5085 - protein, 214 aa, synthetic construct; identical to SEQ ID NO: 686
  REGION 1..214: note = Da_VK-CK

SEQ ID NO: 5086 - protein, 214 aa, synthetic construct; identical to SEQ ID NO: 247
  REGION 1..214: note = Tr_VK-CK

SEQ ID NO: 5087 - protein, 214 aa, synthetic construct
  REGION 1..214: note = Ce_VK-CK
DILLTQSPVILSVSPGERVSFSCRASQSIGTNIHWYQQRTNGSPRLLIKYASESISGIPSRFSGSGSGTDFTLSINSVESEDIADYYCQQNNNWPTTFGAGTKLELKRTVAAPSVFIFPPSDEQLKSGTASVVCLLNNFYPREAKVQWKVDNALQSGNSQESVTEQDSKDSTYSLSSTLTLSKADYEKHKVYACEVTHQGLSSPVTKSFNRGEC

SEQ ID NO: 5088 - protein, 215 aa, synthetic construct; identical to SEQ ID NO: 51
  REGION 1..215: note = Cg_VK-CK

SEQ ID NO: 5089 - protein, 221 aa, synthetic construct; identical to SEQ ID NO: 4828
  REGION 1..221: note = Fc6/knob

SEQ ID NO: 5090 - protein, 698 aa, synthetic construct
  REGION 1..698: note = Fc6/knob/CD40L
CPPCPAPELLGGPSVFLFPPKPKDTLMISRTPEVTCVVVDVSHEDPEVKFNWYVDGVEVHNAKTKPREEQYNSTYRVVSVLTVLHQDWLNGKEYKCKVSNKALPAPIEKTISKAKGQPREPQVYTLPPCRDELTKNQVSLWCLVKGFYPSDIAVEWESNGQPENNYKTTPPVLDSDGSFFLYSKLTVDKSRWQQGNVFSCSVMHEALHNHYTQKSLSLSPGGGGSGGGGSEMQKGDQNPQIAAHVISEASSKTTSVLQWAEKGYYTMSNNLVTLENGKQLTVKRQGLYYIYAQVTFCSNREASSQAPFIASLCLKSPGRFERILLRAANTHSSAKPCGQQSIHLGGVFELQPGASVFVNVTDPSQVSHGTGFTSFGLLKLGGGSGGGGSEMQKGDQNPQIAAHVISEASSKTTSVLQWAEKGYYTMSNNLVTLENGKQLTVKRQGLYYIYAQVTFCSNREASSQAPFIASLCLKSPGRFERILLRAANTHSSAKPCGQQSIHLGGVFELQPGASVFVNVTDPSQVSHGTGFTSFGLLKLGGGSGGGGSEMQKGDQNPQIAAHVISEASSKTTSVLQWAEKGYYTMSNNLVTLENGKQLTVKRQGLYYIYAQVTFCSNREASSQAPFIASLCLKSPGRFERILLRAANTHSSAKPCGQQSIHLGGVFELQPGASVFVNVTDPSQVSHGTGFTSFGLLKL

SEQ ID NO: 5091 - protein, 449 aa, synthetic construct
  REGION 1..449: note = Tr_VH-CH
EVQLVESGGGLVQPGGSLRLSCAASGFNIKDTYIHWVRQAPGKGLEWVARIYPTNGYTRYADSVKGRFTISADTSKNTAYLQMNSLRAEDTAVYYCSRWGGDGFYAMDYWGQGTLVTVSSASTKGPSVFPLAPSSKSTSGGTAALGCLVKDYFPEPVTVSWNSGALTSGVHTFPAVLQSSGLYSLSSVVTVPSSSLGTQTYICNVNHKPSNTKVDKKVEPKSCDKTHTCPPCPAPELLGGPSVFLFPPKPKDTLMISRTPEVTCVVVDVSHEDPEVKFNWYVDGVEVHNAKTKPREEQYNSTYRVVSVLTVLHQDWLNGKEYKCKVSNKALPAPIEKTISKAKGQPREPQVYTLPPSREEMTKNQVSLTCLVKGFYPSDIAVEWESNGQPENNYKTTPPVLDSDGSFFLYSKLTVDKSRWQQGNVFSCSVMHEALHNHYTQKSLSLSPG

SEQ ID NO: 5092 - protein, 448 aa, synthetic construct
  REGION 1..448: note = Ce_VH-CH
QVQLKQSGPGLVQPSQSLSITCTVSGFSLTNYGVHWVRQSPGKGLEWLGVIWSGGNTDYNTPFTSRLSINKDNSKSQVFFKMNSLQSNDTAIYYCARALTYYDYEFAYWGQGTLVTVSAASTKGPSVFPLAPSSKSTSGGTAALGCLVKDYFPEPVTVSWNSGALTSGVHTFPAVLQSSGLYSLSSVVTVPSSSLGTQTYICNVNHKPSNTKVDKRVEPKSCDKTHTCPPCPAPELLGGPSVFLFPPKPKDTLMISRTPEVTCVVVDVSHEDPEVKFNWYVDGVEVHNAKTKPREEQYNSTYRVVSVLTVLHQDWLNGKEYKCKVSNKALPAPIEKTISKAKGQPREPQVYTLPPSREEMTKNQVSLTCLVKGFYPSDIAVEWESNGQPENNYKTTPPVLDSDGSFFLYSKLTVDKSRWQQGNVFSCSVMHEALHNHYTQKSLSLSPG

SEQ ID NO: 5093 - protein, 448 aa, synthetic construct
  REGION 1..448: note = Pt_VH-CH
EVQLVESGGGLVQPGGSLRLSCAASGFTFTDYTMDWVRQAPGKGLEWVADVNPNSGGSIYNQRFKGRFTLSVDRSKNTLYLQMNSLRAEDTAVYYCARNLGPSFYFDYWGQGTLVTVSSASTKGPSVFPLAPSSKSTSGGTAALGCLVKDYFPEPVTVSWNSGALTSGVHTFPAVLQSSGLYSLSSVVTVPSSSLGTQTYICNVNHKPSNTKVDKKVEPKSCDKTHTCPPCPAPELLGGPSVFLFPPKPKDTLMISRTPEVTCVVVDVSHEDPEVKFNWYVDGVEVHNAKTKPREEQYNSTYRVVSVLTVLHQDWLNGKEYKCKVSNKALPAPIEKTISKAKGQPREPQVYTLPPSREEMTKNQVSLTCLVKGFYPSDIAVEWESNGQPENNYKTTPPVLDSDGSFFLYSKLTVDKSRWQQGNVFSCSVMHEALHNHYTQKSLSLSPG

SEQ ID NO: 5094 - protein, 450 aa, synthetic construct
  REGION 1..450: note = Cg_VH-CH/PGLALA
QVQLVQSGAEVKKPGASVKVSCKASGYTFTEFGMNWVRQAPGQGLEWMGWINTKTGEATYVEEFKGRVTFTTDTSTSTAYMELRSLRSDDTAVYYCARWDFAYYVEAMDYWGQGTTVTVSSASTKGPSVFPLAPSSKSTSGGTAALGCLVKDYFPEPVTVSWNSGALTSGVHTFPAVLQSSGLYSLSSVVTVPSSSLGTQTYICNVNHKPSNTKVDKKVEPKSCDKTHTCPPCPAPEAAGGPSVFLFPPKPKDTLMISRTPEVTCVVVDVSHEDPEVKFNWYVDGVEVHNAKTKPREEQYNSTYRVVSVLTVLHQDWLNGKEYKCKVSNKALGAPIEKTISKAKGQPREPQVYTLPPSREEMTKNQVSLTCLVKGFYPSDIAVEWESNGQPENNYKTTPPVLDSDGSFFLYSKLTVDKSRWQQGNVFSCSVMHEALHNHYTQKSLSLSPG

SEQ ID NO: 5095 - protein, 452 aa, synthetic construct
  REGION 1..452: note = Be_VH-CH
EVQLVESGGGLVQPGGSLRLSCAASGYTFTNYGMNWVRQAPGKGLEWVGWINTYTGEPTYAADFKRRFTFSLDTSKSTAYLQMNSLRAEDTAVYYCAKYPHYYGSSHWYFDVWGQGTLVTVSSASTKGPSVFPLAPSSKSTSGGTAALGCLVKDYFPEPVTVSWNSGALTSGVHTFPAVLQSSGLYSLSSVVTVPSSSLGTQTYICNVNHKPSNTKVDKKVEPKSCDKTHTCPPCPAPELLGGPSVFLFPPKPKDTLMISRTPEVTCVVVDVSHEDPEVKFNWYVDGVEVHNAKTKPREEQYNSTYRVVSVLTVLHQDWLNGKEYKCKVSNKALPAPIEKTISKAKGQPREPQVYTLPPSREEMTKNQVSLTCLVKGFYPSDIAVEWESNGQPENNYKTTPPVLDSDGSFFLYSKLTVDKSRWQQGNVFSCSVMHEALHNHYTQKSLSLSPG

SEQ ID NO: 5096 - protein, 445 aa, synthetic construct
  REGION 1..445: note = Ra_VH-CH
EVQLVQSGGGLVKPGGSLRLSCAASGFTFSSYSMNWVRQAPGKGLEWVSSISSSSSYIYYADSVKGRFTISRDNAKNSLYLQMNSLRAEDTAVYYCARVTDAFDIWGQGTMVTVSSASTKGPSVLPLAPSSKSTSGGTAALGCLVKDYFPEPVTVSWNSGALTSGVHTFPAVLQSSGLYSLSSVVTVPSSSLGTQTYICNVNHKPSNTKVDKRVEPKSCDKTHTCPPCPAPELLGGPSVFLFPPKPKDTLMISRTPEVTCVVVDVSHEDPEVKFNWYVDGVEVHNAKTKPREEQYNSTYRVVSVLTVLHQDWLNGKEYKCKVSNKALPAPIEKTISKAKGQPREPQVYTLPPSREEMTKNQVSLTCLVKGFYPSDIAVEWESNGQPENNYKTTPPVLDSDGSFFLYSKLTVDKSRWQQGNVFSCSVMHEALHNHYTQKSLSLSPG

SEQ ID NO: 5097 - protein, 344 aa, synthetic construct
  REGION 1..344: note = SIRPA_Fc
EEELQVIQPDKSVSVAAGESAILHCTVTSLIPVGPIQWFRGAGPARELIYNQKEGHFPRVTTVSESTKRENMDFSISISNITPADAGTYYCVKFRKGSPDTEFKSGAGTELSVRAKPSDKTHTCPPCPAPELLGGPSVFLFPPKPKDTLMISRTPEVTCVVVDVSHEDPEVKFNWYVDGVEVHNAKTKPREEQYNSTYRVVSVLTVLHQDWLNGKEYKCKVSNKALPAPIEKTISKAKGQPREPQVYTLPPSRDELTKNQVSLTCLVKGFYPSDIAVEWESNGQPENNYKTTPPVLDSDGSFFLYSKLTVDKSRWQQGNVFSCSVMHEALHNHYTQKSLSLSPG

SEQ ID NO: 5098 - protein, 376 aa, synthetic construct
  REGION 1..376: note = IL-22_Fc
APISSHCRLDKSNFQQPYITNRTFMLAKEASLADNNTDVRLIGEKLFHGVSMSERCYLMKQVLNFTLEEVLFPQSDRFQPYMQEVVPFLARLSNRLSTCHIEGDDLHIQRNVQKLKDTVKKLGESGEIKAIGELDLLFMSLRNACIRVESKYGPPCPPCPAPEFLGGPSVFLFPPKPKDTLMISRTPEVTCVVVDVSQEDPEVQFNWYVDGVEVHNAKTKPREEQFGSTYRVVSVLTVLHQDWLNGKEYKCKVSNKGLPSSIEKTISKAKGQPREPQVYTLPPSQEEMTKNQVSLTCLVKGFYPSDIAVEWESNGQPENNYKTTPPVLDSDGSFFLYSRLTVDKSRWQEGNVFSCSVMHEALHNHYTQKSLSLSLG

SEQ ID NO: 5099 - protein, 214 aa, synthetic construct; identical to SEQ ID NO: 247
  REGION 1..214: note = Tr_VK-CK

SEQ ID NO: 5100 - protein, 214 aa, synthetic construct; identical to SEQ ID NO: 5087
  REGION 1..214: note = Ce_VK-CK

SEQ ID NO: 5101 - protein, 214 aa, synthetic construct
  REGION 1..214: note = Pt_VK-CK
DIQMTQSPSSLSASVGDRVTITCKASQDVSIGVAWYQQKPGKAPKLLIYSASYRYTGVPSRFSGSGSGTDFTLTISSLQPEDFATYYCQQYYIYPYTFGQGTKVEIKRTVAAPSVFIFPPSDEQLKSGTASVVCLLNNFYPREAKVQWKVDNALQSGNSQESVTEQDSKDSTYSLSSTLTLSKADYEKHKVYACEVTHQGLSSPVTKSFNRGEC

SEQ ID NO: 5102 - protein, 215 aa, synthetic construct; identical to SEQ ID NO: 51
  REGION 1..215: note = Cg_VK-CK

SEQ ID NO: 5103 - protein, 214 aa, synthetic construct
  REGION 1..214: note = Be_VK-CK
DIQMTQSPSSLSASVGDRVTITCSASQDISNYLNWYQQKPGKAPKVLIYFTSSLHSGVPSRFSGSGSGTDFTLTISSLQPEDFATYYCQQYSTVPWTFGQGTKVEIKRTVAAPSVFIFPPSDEQLKSGTASVVCLLNNFYPREAKVQWKVDNALQSGNSQESVTEQDSKDSTYSLSSTLTLSKADYEKHKVYACEVTHQGLSSPVTKSFNRGEC

SEQ ID NO: 5104 - protein, 214 aa, synthetic construct
  REGION 1..214: note = Ra_VK-CK
DIQMTQSPSSVSASIGDRVTITCRASQGIDNWLGWYQQKPGKAPKLLIYDASNLDTGVPSRFSGSGSGTYFTLTISSLQAEDFAVYFCQQAKAFPPTFGGGTKVDIKRTVAAPSVFIFPPSDEQLKSGTASVVCLLNNFYPREAKVQWKVDNALQSGNSQESVTEQDSKDSTYSLSSTLTLSKADYEKHKVYACEVTHQGLSSPVTKSFNRGEC

SEQ ID NO: 5105 - protein, 119 aa, synthetic construct
  REGION 1..119: note = abagovomab heavy chain V region
QVKLQESGAELARPGASVKLSCKASGYTFTNYWMQWVKQRPGQGLDWIGAIYPGDGNTRYTHKFKGKATLTADKSSSTAYMQLSSLASEDSGVYYCARGEGNYAWFAYWGQGTTVTVSS

SEQ ID NO: 5106 - protein, 9 aa, synthetic construct
  REGION 1..9: note = abagovomab heavy chain CDR1
GYTFTNYWM

SEQ ID NO: 5107 - protein, 8 aa, synthetic construct
  REGION 1..8: note = abagovomab heavy chain CDR2
IYPGDGNT

SEQ ID NO: 5108 - protein, 12 aa, synthetic construct
  REGION 1..12: note = abagovomab heavy chain CDR3
ARGEGNYAWFAY

SEQ ID NO: 5109 - protein, 107 aa, synthetic construct
  REGION 1..107: note = abagovomab light chain V region
DIELTQSPASLSASVGETVTITCQASENIYSYLAWHQQKQGKSPQLLVYNAKTLAGGVSSRFSGSGSGTHFSLKIKSLQPEDFGIYYCQHHYGILPTFGGGTKLEIK

SEQ ID NO: 5110 - protein, 6 aa, synthetic construct
  REGION 1..6: note = abagovomab light chain CDR1
ENIYSY

SEQ ID NO: 5111 - skipped

SEQ ID NO: 5112 - protein, 9 aa, synthetic construct
  REGION 1..9: note = abagovomab light chain CDR3
QHHYGILPT

SEQ ID NO: 5113 - protein, 122 aa, synthetic construct
  REGION 1..122: note = abelacimab heavy chain V region
QVQLLESGGGLVQPGGSLRLSCAASGFTFSTAAMSWVRQAPGKGLEWVSGISGSGSSTYYADSVKGRFTISRDNSKNTLYLQMNSLRAEDTAVYYCARELSYLYSGYYFDYWGQGTLVTVSS

SEQ ID NO: 5114 - protein, 8 aa, synthetic construct
  REGION 1..8: note = abelacimab heavy chain CDR1
GFTFSTAA

SEQ ID NO: 5115 - protein, 8 aa, synthetic construct
  REGION 1..8: note = abelacimab heavy chain CDR2
ISGSGSST

SEQ ID NO: 5116 - protein, 15 aa, synthetic construct
  REGION 1..15: note = abelacimab heavy chain CDR3
ARELSYLYSGYYFDY

SEQ ID NO: 5117 - protein, 121 aa, synthetic construct
  REGION 1..121: note = abelacimab light chain V region
QSVLTQPPSASGTPGQRVTISCSGSSSNIGSNDVSWYQQLPGTAPKLLIYKNYNRPSGVPDRFSGSKSGTSASLAISGLQSEDEADYYCSAWDQRQFDVVFGGGTKLTVLGQPKAAPSVTL

SEQ ID NO: 5118 - protein, 8 aa, synthetic construct
  REGION 1..8: note = abelacimab light chain CDR1
SSNIGSND

SEQ ID NO: 5119 - skipped

SEQ ID NO: 5120 - protein, 11 aa, synthetic construct
  REGION 1..11: note = abelacimab light chain CDR3
SAWDQRQFDVV

SEQ ID NO: 5121 - protein, 118 aa, synthetic construct [sequence omitted]

SEQ ID NO: 5122 - protein, 8 aa, synthetic construct
  REGION 1..8: note = abituzumab heavy chain CDR1
GYTFSSFW

SEQ ID NO: 5123 - protein, 8 aa, synthetic construct
  REGION 1..8: note = abituzumab heavy chain CDR2
INPRSGYT

SEQ ID NO: 5124 - protein, 11 aa, synthetic construct
  REGION 1..11: note = abituzumab heavy chain CDR3
ASFLGRGAMDY

SEQ ID NO: 5125 - protein, 107 aa, synthetic construct [sequence omitted]

SEQ ID NO: 5126 - protein, 6 aa, synthetic construct
  REGION 1..6: note = abituzumab light chain CDR1
QDISNY

SEQ ID NO: 5127 - skipped

SEQ ID NO: 5128 - protein, 9 aa, synthetic construct
  REGION 1..9: note = abituzumab light chain CDR3
QQGNTFPYT

SEQ ID NO: 5129 - protein, 120 aa, synthetic construct
  REGION 1..120: note = abrezekimab heavy chain V region
QVTLKESGPVLVKPTETLTLTCTVSGFSLTNYHVQWIRQPPGKALEWLGVMWSDGDTSFNSVLKSRLTISRDTSKSQVVLTMTNMDPVDTATYYCARDGTIAAMDYFDYWGQGTLVTVSS

SEQ ID NO: 5130 - protein, 8 aa, synthetic construct
  REGION 1..8: note = abrezekimab heavy chain CDR1
GFSLTNYH

SEQ ID NO: 5131 - protein, 7 aa, synthetic construct
  REGION 1..7: note = abrezekimab heavy chain CDR2
MWSDGDT

SEQ ID NO: 5132 - protein, 14 aa, synthetic construct
  REGION 1..14: note = abrezekimab heavy chain CDR3
ARDGTIAAMDYFDY

SEQ ID NO: 5133 - protein, 107 aa, synthetic construct
  REGION 1..107: note = abrezekimab light chain V region
DIQMTQSPSSLSASVGDRVTITCLASEDISNYLAWYQQKPGKAPKLLIYHTSRLQDGVPSRFSGSGSGTDFTLTISSLQPEDFATYYCQQGYRFPLTFGGGTKVEIK

SEQ ID NO: 5134 - protein, 6 aa, synthetic construct
  REGION 1..6: note = abrezekimab light chain CDR1
EDISNY

SEQ ID NO: 5135 - skipped

SEQ ID NO: 5136 - protein, 9 aa, synthetic construct
  REGION 1..9: note = abrezekimab light chain CDR3
QQGYRFPLT

SEQ ID NO: 5137 - protein, 118 aa, synthetic construct [sequence omitted]

SEQ ID NO: 5138 - protein, 8 aa, synthetic construct
  REGION 1..8: note = abrilumab heavy chain CDR1
GYTLSDLS

SEQ ID NO: 5139 - protein, 8 aa, synthetic construct
  REGION 1..8: note = abrilumab heavy chain CDR2
FDPQDGET

SEQ ID NO: 5140 - protein, 11 aa, synthetic construct
  REGION 1..11: note = abrilumab heavy chain CDR3
ATGSSSSWFDP

SEQ ID NO: 5141 - protein, 107 aa, synthetic construct [sequence omitted]

SEQ ID NO: 5142 - protein, 6 aa, synthetic construct
  REGION 1..6: note = abrilumab light chain CDR1
QGISSW

SEQ ID NO: 5143 - skipped

SEQ ID NO: 5144 - protein, 9 aa, synthetic construct
  REGION 1..9: note = abrilumab light chain CDR3
QQANSFPWT

SEQ ID NO: 5145 - protein, 121 aa, synthetic construct
  REGION 1..121: note = acapatamab heavy chain V region
QVQLVESGGGLVKPGESLRLSCAASGFTFSDYYMYWVRQAPGKCLEWVAIISDGGYYTYYSDIIKGRFTISRDNAKNSLYLQMNSLKAEDTAVYYCARGFPLLRHGAMDYWGQGTLVTVSS

SEQ ID NO: 5146 - protein, 8 aa, synthetic construct
  REGION 1..8: note = acapatamab heavy chain CDR1
GFTFSDYY

SEQ ID NO: 5147 - protein, 8 aa, synthetic construct
  REGION 1..8: note = acapatamab heavy chain CDR2
ISDGGYYT

SEQ ID NO: 5148 - protein, 14 aa, synthetic construct
  REGION 1..14: note = acapatamab heavy chain CDR3
ARGFPLLRHGAMDY

SEQ ID NO: 5149 - protein, 107 aa, synthetic construct
  REGION 1..107: note = acapatamab light chain V region
DIQMTQSPSSLSASVGDRVTITCKASQNVDTNVAWYQQKPGQAPKSLIYSASYVYWDVPSRFSGSASGTDFTLTISSVQSEDFATYYCQQYDQQLITFGCGTKLEIK

SEQ ID NO: 5150 - protein, 6 aa, synthetic construct
  REGION 1..6: note = acapatamab light chain CDR1
QNVDTN

SEQ ID NO: 5151 - skipped

SEQ ID NO: 5152 - protein, 9 aa, synthetic construct
  REGION 1..9: note = acapatamab light chain CDR3
QQYDQQLIT

SEQ ID NO: 5153 - protein, 121 aa, synthetic construct
  REGION 1..121: note = acasunlimab heavy chain V region
EVQLLEPGGGLVQPGGSLRLSCEASGSTFSTYAMSWVRQAPGKGLEWVSGFSGSGGFTFYADSVRGRFTISRDSSKNTLFLQMSSLRAEDTAVYYCAIPARGYNYGSFQHWGQGTLVTVSS

SEQ ID NO: 5154 - protein, 8 aa, synthetic construct
  REGION 1..8: note = acasunlimab heavy chain CDR1
GSTFSTYA

SEQ ID NO: 5155 - protein, 8 aa, synthetic construct
  REGION 1..8: note = acasunlimab heavy chain CDR2
FSGSGGFT

SEQ ID NO: 5156 - protein, 14 aa, synthetic construct
  REGION 1..14: note = acasunlimab heavy chain CDR3
AIPARGYNYGSFQH

SEQ ID NO: 5157 - protein, 108 aa, synthetic construct
  REGION 1..108: note = acasunlimab light chain V region
SYVLTQPPSVSVAPGQTARITCGGNNIGSKSVHWYQQKPGQAPVLVVYDDNDRPSGLPERFSGSNSGNTATLTISRVEAGDEADYYCQVWDSSSDHVVFGGGTKLTVL

SEQ ID NO: 5158 - protein, 6 aa, synthetic construct
  REGION 1..6: note = acasunlimab light chain CDR1
NIGSKS

SEQ ID NO: 5159 - skipped

SEQ ID NO: 5160 - protein, 11 aa, synthetic construct
  REGION 1..11: note = acasunlimab light chain CDR3
QVWDSSSDHVV

SEQ ID NO: 5161 - protein, 122 aa, synthetic construct
  REGION 1..122: note = actoxumab heavy chain V region
QVQLVESGGGVVQPGRSLRLSCAASGFSFSNYGMHWVRQAPGKGLEWVALIWYDGSNEDYTDSVKGRFTISRDNSKNTLYLQMNSLRAEDTAVYYCARWGMVRGVIDVFDIWGQGTVVTVSS

SEQ ID NO: 5162 - protein, 8 aa, synthetic construct
  REGION 1..8: note = actoxumab heavy chain CDR1
GFSFSNYG

SEQ ID NO: 5163 - protein, 8 aa, synthetic construct
  REGION 1..8: note = actoxumab heavy chain CDR2
IWYDGSNE

SEQ ID NO: 5164 - protein, 15 aa, synthetic construct
  REGION 1..15: note = actoxumab heavy chain CDR3
ARWGMVRGVIDVFDI

SEQ ID NO: 5165 - protein, 107 aa, synthetic construct
  REGION 1..107: note = actoxumab light chain V region
DIQMTQSPSSVSASVGDRVTITCRASQGISSWLAWYQHKPGKAPKLLIYAASSLQSGVPSRFSGSGSGTDFTLTISSLQPEDFATYYCQQANSFPWTFGQGTKVEIK

SEQ ID NO: 5166 - protein, 6 aa, synthetic construct
  REGION 1..6: note = actoxumab light chain CDR1
QGISSW

SEQ ID NO: 5167 - skipped

SEQ ID NO: 5168 - protein, 9 aa, synthetic construct
  REGION 1..9: note = actoxumab light chain CDR3
QQANSFPWT

SEQ ID NO: 5169 - protein, 107 aa, synthetic construct
  REGION 1..107: note = adalimumab beta heavy chain V region
EVQLVESGGGLVQPGRSLRLSCAASGFTFDDYAMHWVRQAPGKGLEWVSAITWNSGHIDYADSVEGRFTISRDNAKNSLYLQMNSLRAEDTAVYYCAKVSYLSTASS

SEQ ID NO: 5170 - protein, 8 aa, synthetic construct
  REGION 1..8: note = adalimumab beta heavy chain CDR1
GFTFDDYA

SEQ ID NO: 5171 - protein, 8 aa, synthetic construct
  REGION 1..8: note = adalimumab beta heavy chain CDR2
ITWNSGHI

SEQ ID NO: 5172 - protein, 14 aa, synthetic construct
  REGION 1..14: note = adalimumab beta heavy chain CDR3
AKVSYLSTASSLDY

SEQ ID NO: 5173 - protein, 107 aa, synthetic construct [sequence omitted]

SEQ ID NO: 5174 - protein, 6 aa, synthetic construct
  REGION 1..6: note = adalimumab beta light chain CDR1
QGIRNY

SEQ ID NO: 5175 - skipped

SEQ ID NO: 5176 - protein, 9 aa, synthetic construct
  REGION 1..9: note = adalimumab beta light chain CDR3
QRYNRAPYT

SEQ ID NO: 5177 - protein, 119 aa, synthetic construct
  REGION 1..119: note = adebrelimab heavy chain V region
QVQLVQSGAEVKKPGASVKVSCKASGYTFTSYWMHWVRQAPGQGLEWMGRIGPNSGFTSYNEKFKNRVTMTRDTSTSTVYMELSSLRSEDTAVYYCARGGSSYDYFDYWGQGTTVTVSS

SEQ ID NO: 5178 - protein, 8 aa, synthetic construct
  REGION 1..8: note = adebrelimab heavy chain CDR1
GYTFTSYW

SEQ ID NO: 5179 - protein, 8 aa, synthetic construct
  REGION 1..8: note = adebrelimab heavy chain CDR2
IGPNSGFT

SEQ ID NO: 5180 - protein, 12 aa, synthetic construct
  REGION 1..12: note = adebrelimab heavy chain CDR3
ARGGSSYDYFDY

SEQ ID NO: 5181 - protein, 111 aa, synthetic construct
  REGION 1..111: note = adebrelimab light chain V region
DIVLTQSPASLAVSPGQRATITCRASESVSIHGTHLMHWYQQKPGQPPKLLIYAASNLESGVPARFSGSGSGTDFTLTINPVEAEDTANYYCQQSFEDPLTFGQGTKLEIK

SEQ ID NO: 5182 - protein, 10 aa, synthetic construct
  REGION 1..10: note = adebrelimab light chain CDR1
ESVSIHGTHL

SEQ ID NO: 5183 - skipped

SEQ ID NO: 5184 - protein, 9 aa, synthetic construct
  REGION 1..9: note = adebrelimab light chain CDR3
QQSFEDPLT

SEQ ID NO: 5185 - protein, 124 aa, synthetic construct
  REGION 1..124: note = adintrevimab heavy chain V region
EVQLVESGGGLVKPGGSLRLSCAASGFTFSSYYMNWVRQAPGKGLEWVSSISEDGYSTYYPDSLKGRFTISRDSAKNSLYLQMNSLRADDTAVYYCARDFSGHTAWAGTGFEYWGQGTLVTVSS

SEQ ID NO: 5186 - protein, 8 aa, synthetic construct
  REGION 1..8: note = adintrevimab heavy chain CDR1
GFTFSSYY

SEQ ID NO: 5187 - protein, 8 aa, synthetic construct
  REGION 1..8: note = adintrevimab heavy chain CDR2
ISEDGYST

SEQ ID NO: 5188 - protein, 17 aa, synthetic construct
  REGION 1..17: note = adintrevimab heavy chain CDR3
ARDFSGHTAWAGTGFEY

SEQ ID NO: 5189 - protein, 112 aa, synthetic construct
  REGION 1..112: note = adintrevimab light chain V region
QSVLTQPPSVSGAPGQRITISCTGSSSNIGAGYDVHWYQQLPGTAPKLLIYGSSSRNSGVPDRFSGSKSGTSASLAITGLQAEDEADYYCQSYDSSLSVLYTFGTGTKVTVL

SEQ ID NO: 5190 - protein, 9 aa, synthetic construct
  REGION 1..9: note = adintrevimab light chain CDR1
SSNIGAGYD

SEQ ID NO: 5191 - skipped

SEQ ID NO: 5192 - protein, 12 aa, synthetic construct
  REGION 1..12: note = adintrevimab light chain CDR3
QSYDSSLSVLYT

SEQ ID NO: 5193 - protein, 124 aa, synthetic construct
  REGION 1..124: note = aducanumab heavy chain V region
QVQLVESGGGVVQPGRSLRLSCAASGFAFSSYGMHWVRQAPGKGLEWVAVIWFDGTKKYYTDSVKGRFTISRDNSKNTLYLQMNTLRAEDTAVYYCARDRGIGARRGPYYMDVWGKGTTVTVSS

SEQ ID NO: 5194 - protein, 8 aa, synthetic construct
  REGION 1..8: note = aducanumab heavy chain CDR1
GFAFSSYG

SEQ ID NO: 5195 - protein, 8 aa, synthetic construct
  REGION 1..8: note = aducanumab heavy chain CDR2
IWFDGTKK

SEQ ID NO: 5196 - protein, 10 aa, synthetic construct
  REGION 1..10: note = aducanumab heavy chain CDR3
ARRGPYYMDV

SEQ ID NO: 5197 - protein, 107 aa, synthetic construct [sequence omitted]

SEQ ID NO: 5198 - protein, 6 aa, synthetic construct
  REGION 1..6: note = aducanumab light chain CDR1
QSISSY

SEQ ID NO: 5199 - skipped

SEQ ID NO: 5200 - protein, 9 aa, synthetic construct
  REGION 1..9: note = aducanumab light chain CDR3
QQSYSTPLT

SEQ ID NO: 5201 - protein, 123 aa, synthetic construct
  REGION 1..123: note = afasevikumab heavy chain V region
EVQLVESGGGLVQPGRSLRLSCAASGFTFDDYAMHWVRQAPGKGLEWVSGINWSSGGIGYADSVKGRFTISRDNAKNSLYLQMNSLRAEDTALYYCARDIGGFGEFYWNFGLWGRGTLVTVSS

SEQ ID NO: 5202 - protein, 8 aa, synthetic construct
  REGION 1..8: note = afasevikumab heavy chain CDR1
GFTFDDYA

SEQ ID NO: 5203 - protein, 8 aa, synthetic construct
  REGION 1..8: note = afasevikumab heavy chain CDR2
INWSSGGI

SEQ ID NO: 5204 - protein, 16 aa, synthetic construct
  REGION 1..16: note = afasevikumab heavy chain CDR3
ARDIGGFGEFYWNFGL

SEQ ID NO: 5205 - protein, 108 aa, synthetic construct
  REGION 1..108: note = afasevikumab light chain V region
EIVLTQSPATLSLSPGERATLSCRASQSVRSYLAWYQQKPGQAPRLLIYDASNRATGIPARFSGSGSGTDFTLTISSLEPEDFAVYYCQQRSNWPPATFGGGTKVEIK

SEQ ID NO: 5206 - protein, 6 aa, synthetic construct
  REGION 1..6: note = afasevikumab light chain CDR1
QSVRSY

SEQ ID NO: 5207 - skipped

SEQ ID NO: 5208 - protein, 10 aa, synthetic construct
  REGION 1..10: note = afasevikumab light chain CDR3
QQRSNWPPAT

SEQ ID NO: 5209 - protein, 121 aa, synthetic construct
  REGION 1..121: note = alemtuzumab heavy chain V region
QVQLQESGPGLVRPSQTLSLTCTVSGFTFTDFYMNWVRQPPGRGLEWIGFIRDKAKGYTTEYNPSVKGRVTMLVDTSKNQFSLRLSSVTAADTAVYYCAREGHTAAPFDYWGQGSLVTVSS

SEQ ID NO: 5210 - protein, 8 aa, synthetic construct
  REGION 1..8: note = alemtuzumab heavy chain CDR1
GFTFTDFY

SEQ ID NO: 5211 - protein, 10 aa, synthetic construct
  REGION 1..10: note = alemtuzumab heavy chain CDR2
IRDKAKGYTT

SEQ ID NO: 5212 - protein, 12 aa, synthetic construct
  REGION 1..12: note = alemtuzumab heavy chain CDR3
AREGHTAAPFDY

SEQ ID NO: 5213 - protein, 107 aa, synthetic construct
  REGION 1..107: note = alemtuzumab light chain V region
DIQMTQSPSSLSASVGDRVTITCKASQNIDKYLNWYQQKPGKAPKLLIYNTNNLQTGVPSRFSGSGSGTDFTFTISSLQPEDIATYYCLQHISRPRTFGQGTKVEIK

SEQ ID NO: 5214 - protein, 6 aa, synthetic construct
  REGION 1..6: note = alemtuzumab light chain CDR1
QNIDKY

SEQ ID NO: 5215 - skipped

SEQ ID NO: 5216 - protein, 9 aa, synthetic construct
  REGION 1..9: note = alemtuzumab light chain CDR3
LQHISRPRT

SEQ ID NO: 5217 - protein, 118 aa, synthetic construct [sequence omitted]

SEQ ID NO: 5218 - protein, 8 aa, synthetic construct
  REGION 1..8: note = alirocumab heavy chain CDR1
GFTFNNYA

SEQ ID NO: 5219 - protein, 8 aa, synthetic construct
  REGION 1..8: note = alirocumab heavy chain CDR2
ISGSGGTT

SEQ ID NO: 5220 - protein, 11 aa, synthetic construct
  REGION 1..11: note = alirocumab heavy chain CDR3
AKDSNWGNFDL

SEQ ID NO: 5221 - protein, 113 aa, synthetic construct [sequence omitted]

SEQ ID NO: 5222 - protein, 12 aa, synthetic construct
  REGION 1..12: note = alirocumab light chain CDR1
QSVLYRSNNRNF

SEQ ID NO: 5223 - skipped

SEQ ID NO: 5224 - protein, 9 aa, synthetic construct
  REGION 1..9: note = alirocumab light chain CDR3
QQYYTTPYT

SEQ ID NO: 5225 - protein, 124 aa, synthetic construct
  REGION 1..124: note = alomfilimab heavy chain V region
EVQLVESGGGVVRPGGSLRLSCVASGVTFDDYGMSWVRQAPGKGLEWVSGINWNGGDTDYSDSVKGRFTISRDNAKNSLYLQMNSLRAEDTALYYCARDFYGSGSYYHVPFDYWGQGILVTVSS

SEQ ID NO: 5226 - protein, 8 aa, synthetic construct
  REGION 1..8: note = alomfilimab heavy chain CDR1
GVTFDDYG

SEQ ID NO: 5227 - protein, 8 aa, synthetic construct
  REGION 1..8: note = alomfilimab heavy chain CDR2
INWNGGDT

SEQ ID NO: 5228 - protein, 17 aa, synthetic construct
  REGION 1..17: note = alomfilimab heavy chain CDR3
ARDFYGSGSYYHVPFDY

SEQ ID NO: 5229 - protein, 108 aa, synthetic construct
  REGION 1..108: note = alomfilimab light chain V region
EIVLTQSPGTLSLSPGERATLSCRASQSVSRSYLAWYQQKRGQAPRLLIYGASSRATGIPDRFSGDGSGTDFTLSISRLEPEDFAVYYCHQYDMSPFTFGPGTKVDIK

SEQ ID NO: 5230 - protein, 7 aa, synthetic construct
  REGION 1..7: note = alomfilimab light chain CDR1
QSVSRSY

SEQ ID NO: 5231 - skipped

SEQ ID NO: 5232 - protein, 9 aa, synthetic construct
  REGION 1..9: note = alomfilimab light chain CDR3
HQYDMSPFT

SEQ ID NO: 5233 - protein, 120 aa, synthetic construct
  REGION 1..120: note = alsevalimab heavy chain V region
QLQLQESGPGLVKPSETLSLTCTVSGGSIKSGSYYWGWIRQPPGKGLEWIGNIYYSGSTYYNPSLRSRVTISVDTSKNQFSLKLSSVTAADTAVYYCAREGSYPNQFDPWGQGTLVTVSS

SEQ ID NO: 5234 - protein, 10 aa, synthetic construct
  REGION 1..10: note = alsevalimab heavy chain CDR1
GGSIKSGSYY

SEQ ID NO: 5235 - protein, 7 aa, synthetic construct
  REGION 1..7: note = alsevalimab heavy chain CDR2
IYYSGST

SEQ ID NO: 5236 - protein, 12 aa, synthetic construct
  REGION 1..12: note = alsevalimab heavy chain CDR3
AREGSYPNQFDP

SEQ ID NO: 5237 - protein, 107 aa, synthetic construct
  REGION 1..107: note = alsevalimab light chain V region
EIVMTQSPATLSVSPGERATLSCRASQSVSSNLAWYQQKPGQAPRLLIYGASTRATGIPARFSGSGSGTEFTLTISSLQSEDFAVYYCQQYHSFPFTFGGGTKVEIK

SEQ ID NO: 5238 - protein, 6 aa, synthetic construct
  REGION 1..6: note = alsevalimab light chain CDR1
QSVSSN

SEQ ID NO: 5239 - skipped

SEQ ID NO: 5240 - protein, 9 aa, synthetic construct
  REGION 1..9: note = alsevalimab light chain CDR3
QQYHSFPFT

SEQ ID NO: 5241 - protein, 125 aa, synthetic construct [sequence omitted]

SEQ ID NO: 5242 - protein, 8 aa, synthetic construct
  REGION 1..8: note = amivantamab heavy chain CDR1
GFTFSTYG

SEQ ID NO: 5243 - protein, 8 aa, synthetic construct
  REGION 1..8: note = amivantamab heavy chain CDR2
IWDDGSYK

SEQ ID NO: 5244 - protein, 18 aa, synthetic construct
  REGION 1..18: note = amivantamab heavy chain CDR3
ARDGITMVRGVMKDYFDY

SEQ ID NO: 5245 - protein, 107 aa, synthetic construct [sequence omitted]

SEQ ID NO: 5246 - protein, 6 aa, synthetic construct
  REGION 1..6: note = amivantamab light chain CDR1
QDISSA

SEQ ID NO: 5247 - skipped

SEQ ID NO: 5248 - protein, 9 aa, synthetic construct
  REGION 1..9: note = amivantamab light chain CDR3
QQFNSYPLT

SEQ ID NO: 5249 - protein, 117 aa, synthetic construct
  REGION 1..117: note = amubarvimab heavy chain V region
EVQLVESGGGLVQPGGSLRLSCAASGITVSSNYMNWVRQAPGKGLEWVSLIYSGGSTYYADSVKGRFTISRDNSKNTLYLQMNSLRAEDTAVYHCARDLVVYGMDVWGQGTTVTVSS

SEQ ID NO: 5250 - protein, 8 aa, synthetic construct
  REGION 1..8: note = amubarvimab heavy chain CDR1
GITVSSNY

SEQ ID NO: 5251 - protein, 7 aa, synthetic construct
  REGION 1..7: note = amubarvimab heavy chain CDR2
IYSGGST

SEQ ID NO: 5252 - protein, 11 aa, synthetic construct
  REGION 1..11: note = amubarvimab heavy chain CDR3
ARDLVVYGMDV

SEQ ID NO: 5253 - protein, 107 aa, synthetic construct
  REGION 1..107: note = amubarvimab light chain V region
EIVLTQSPGTLSLSPGERATLSCRASQSVSSSYLAWYQQKPGQAPRLLIYGASSRATGIPDRFSGSGSGTDFTLTISRLEPEDFAVYYCQQYGSSPTFGQGTKLEIK

SEQ ID NO: 5254 - protein, 7 aa, synthetic construct
  REGION 1..7: note = amubarvimab light chain CDR1
QSVSSSY

SEQ ID NO: 5255 - skipped

SEQ ID NO: 5256 - protein, 8 aa, synthetic construct
  REGION 1..8: note = amubarvimab light chain CDR3
QQYGSSPT

SEQ ID NO: 5257 - protein, 120 aa, synthetic construct
  REGION 1..120: note = anetumab corixetan heavy chain V region
QVELVQSGAEVKKPGESLKISCKGSGYSFTSYWIGWVRQAPGKGLEWMGIIDPGDSRTRYSPSFQGQVTISADKSISTAYLQWSSLKASDTAMYYCARGQLYGGTYMDGWGQGTLVTVSS

SEQ ID NO: 5258 - protein, 8 aa, synthetic construct
  REGION 1..8: note = anetumab corixetan heavy chain CDR1
GYSFTSYW

SEQ ID NO: 5259 - protein, 8 aa, synthetic construct
  REGION 1..8: note = anetumab corixetan heavy chain CDR2
IDPGDSRT

SEQ ID NO: 5260 - protein, 13 aa, synthetic construct
  REGION 1..13: note = anetumab corixetan heavy chain CDR3
ARGQLYGGTYMDG

SEQ ID NO: 5261 - protein, 111 aa, synthetic construct
  REGION 1..111: note = anetumab corixetan light chain V region
DIALTQPASVSGSPGQSITISCTGTSSDIGGYNSVSWYQQHPGKAPKLMIYGVNNRPSGVSNRFSGSKSGNTASLTISGLQAEDEADYYCSSYDIESATPVFGGGTKLTVL

SEQ ID NO: 5262 - protein, 9 aa, synthetic construct
  REGION 1..9: note = anetumab corixetan light chain CDR1
SSDIGGYNS

SEQ ID NO: 5263 - skipped

SEQ ID NO: 5264 - protein, 11 aa, synthetic construct
  REGION 1..11: note = anetumab corixetan light chain CDR3
SSYDIESATPV

SEQ ID NO: 5265 - protein, 120 aa, synthetic construct; identical to SEQ ID NO: 5257
  REGION 1..120: note = anetumab ravtansine heavy chain V region

SEQ ID NO: 5266 - protein, 8 aa, synthetic construct
  REGION 1..8: note = anetumab ravtansine heavy chain CDR1
GYSFTSYW

SEQ ID NO: 5267 - protein, 8 aa, synthetic construct
  REGION 1..8: note = anetumab ravtansine heavy chain CDR2
IDPGDSRT

SEQ ID NO: 5268 - protein, 13 aa, synthetic construct
  REGION 1..13: note = anetumab ravtansine heavy chain CDR3
ARGQLYGGTYMDG

SEQ ID NO: 5269 - protein, 111 aa, synthetic construct; identical to SEQ ID NO: 5261
  REGION 1..111: note = anetumab ravtansine light chain V region

SEQ ID NO: 5270 - protein, 9 aa, synthetic construct
  REGION 1..9: note = anetumab ravtansine light chain CDR1
SSDIGGYNS

SEQ ID NO: 5271 - skipped

SEQ ID NO: 5272 - protein, 11 aa, synthetic construct
  REGION 1..11: note = anetumab ravtansine light chain CDR3
SSYDIESATPV

SEQ ID NO: 5273 - protein, 117 aa, synthetic construct [sequence omitted]

SEQ ID NO: 5274 - protein, 8 aa, synthetic construct
  REGION 1..8: note = anifrolumab heavy chain CDR1
GYIFTNYW

SEQ ID NO: 5275 - protein, 8 aa, synthetic construct
  REGION 1..8: note = anifrolumab heavy chain CDR2
IYPGDSDI

SEQ ID NO: 5276 - protein, 10 aa, synthetic construct
  REGION 1..10: note = anifrolumab heavy chain CDR3
ARHDIEGFDY

SEQ ID NO: 5277 - protein, 108 aa, synthetic construct [sequence omitted]

SEQ ID NO: 5278 - protein, 8 aa, synthetic construct
  REGION 1..8: note = anifrolumab light chain CDR1
QSVSSSFF

SEQ ID NO: 5279 - skipped

SEQ ID NO: 5280 - protein, 9 aa, synthetic construct
  REGION 1..9: note = anifrolumab light chain CDR3
QQYDSSAIT

SEQ ID NO: 5281 - protein, 119 aa, synthetic construct
  REGION 1..119: note = ansuvimab heavy chain V region
EVQLVESGGGLIQPGGSLRLSCAASGFALRMYDMHWVRQTIDKRLEWVSAVGPSGDTTYADSVKGRFAVSRENAKNSLSLQMNSLTAGDTAIYYCVRSDRGVAGLFDSWGQGILVTVSS

SEQ ID NO: 5282 - protein, 8 aa, synthetic construct
  REGION 1..8: note = ansuvimab heavy chain CDR1
GFALRMYD

SEQ ID NO: 5283 - protein, 7 aa, synthetic construct
  REGION 1..7: note = ansuvimab heavy chain CDR2
VGPSGDT

SEQ ID NO: 5284 - protein, 13 aa, synthetic construct
  REGION 1..13: note = ansuvimab heavy chain CDR3
VRSDRGVAGLFDS

SEQ ID NO: 5285 - protein, 107 aa, synthetic construct [sequence omitted]

SEQ ID NO: 5286 - protein, 6 aa, synthetic construct
  REGION 1..6: note = ansuvimab light chain CDR1
QAFDNY

SEQ ID NO: 5287 - skipped

SEQ ID NO: 5288 - protein, 9 aa, synthetic construct
  REGION 1..9: note = ansuvimab light chain CDR3
QNYNSAPLT

SEQ ID NO: 5289 - protein, 118 aa, synthetic construct
  REGION 1..118: note = anumigilimab heavy chain V region
EVQLLESGGGLVQPGGSLRLSCAASGFTFSLYWMGWVRQAPGKGLEWVSSISSSGGVTPYADSVKGRFTISRDNSKNTLYLQMNSLRAEDTAVYYCAKLGELGWFDPWGQGTLVTVSS

SEQ ID NO: 5290 - protein, 8 aa, synthetic construct
  REGION 1..8: note = anumigilimab heavy chain CDR1
GFTFSLYW

SEQ ID NO: 5291 - protein, 8 aa, synthetic construct
  REGION 1..8: note = anumigilimab heavy chain CDR2
ISSSGGVT

SEQ ID NO: 5292 - protein, 11 aa, synthetic construct
  REGION 1..11: note = anumigilimab heavy chain CDR3
AKLGELGWFDP

SEQ ID NO: 5293 - protein, 107 aa, synthetic construct
  REGION 1..107: note = anumigilimab light chain V region
DIQMTQSPSSLSASVGDRVTITCRASQGISSYLNWYQQKPGKAPKLLIYYASNLQNGVPSRFSGSGSGTDFTLTISSLQPEDFATYYCQQSYSTPLTFGGGTKVEIK

SEQ ID NO: 5294 - protein, 6 aa, synthetic construct
  REGION 1..6: note = anumigilimab light chain CDR1
QGISSY

SEQ ID NO: 5295 - skipped

SEQ ID NO: 5296 - protein, 9 aa, synthetic construct
  REGION 1..9: note = anumigilimab light chain CDR3
QQSYSTPLT

SEQ ID NO: 5297 - protein, 126 aa, synthetic construct
  REGION 1..126: note = apitegromab heavy chain V region
QVQLVESGGGVVQPGRSLRLSCAASGFTFSSYGMHWVRQAPGKGLEWVAVISYDGSNKYYADSVKGRFTISRDNSKNTLYLQMNSLRAEDTAVYYCARDLLVRFLEWSHYYGMDVWGQGTTVTVSS

SEQ ID NO: 5298 - protein, 8 aa, synthetic construct
  REGION 1..8: note = apitegromab heavy chain CDR1
GFTFSSYG

SEQ ID NO: 5299 - protein, 8 aa, synthetic construct
  REGION 1..8: note = apitegromab heavy chain CDR2
ISYDGSNK

SEQ ID NO: 5300 - protein, 19 aa, synthetic construct
  REGION 1..19: note = apitegromab heavy chain CDR3
ARDLLVRFLEWSHYYGMDV

SEQ ID NO: 5301 - protein, 109 aa, synthetic construct
  REGION 1..109: note = apitegromab light chain V region
QSVLTQPPSASGTPGQRVTISCSGSSSNIGSNTVHWYQQLPGTAPKLLIYSDNQRPSGVPDRFSGSKSGTSASLAISGLQSEDEADYYCAAWDDSLNGVFGGGTKLTVL

SEQ ID NO: 5302 - protein, 8 aa, synthetic construct
  REGION 1..8: note = apitegromab light chain CDR1
SSNIGSNT

SEQ ID NO: 5303 - skipped

SEQ ID NO: 5304 - protein, 10 aa, synthetic construct
  REGION 1..10: note = apitegromab light chain CDR3
AAWDDSLNGV

SEQ ID NO: 5305 - protein, 122 aa, synthetic construct
  REGION 1..122: note = aprutumab heavy chain V region
EVQLLESGGGLVQPGGSLRLSCAASGFTFSSYAMSWVRQAPGKGLEWVSAISGSGTSTYYADSVKGRFTISRDNSKNTLYLQMNSLRAEDTAVYYCARVRYNWNHGDWFDPWGQGTLVTVSS

SEQ ID NO: 5306 - protein, 8 aa, synthetic construct
  REGION 1..8: note = aprutumab heavy chain CDR1
GFTFSSYA

SEQ ID NO: 5307 - protein, 8 aa, synthetic construct
  REGION 1..8: note = aprutumab heavy chain CDR2
ISGSGTST

SEQ ID NO: 5308 - protein, 15 aa, synthetic construct
  REGION 1..15: note = aprutumab heavy chain CDR3
ARVRYNWNHGDWFDP

SEQ ID NO: 5309 - protein, 110 aa, synthetic construct
  REGION 1..110: note = aprutumab light chain V region
QSVLTQPPSASGTPGQRVTISCSGSSSNIGNNYVSWYQQLPGTAPKLLIYENYNRPAGVPDRFSGSKSGTSASLAISGLRSEDEADYYCSSWDDSLNYWVFGGGTKLTVL

SEQ ID NO: 5310 - protein, 8 aa, synthetic construct
  REGION 1..8: note = aprutumab light chain CDR1
SSNIGNNY

SEQ ID NO: 5311 - skipped

SEQ ID NO: 5312 - protein, 11 aa, synthetic construct
  REGION 1..11: note = aprutumab light chain CDR3
SSWDDSLNYWV

SEQ ID NO: 5313 - protein, 122 aa, synthetic construct; identical to SEQ ID NO: 5305
  REGION 1..122: note = aprutumab ixadotin heavy chain V region

SEQ ID NO: 5314 - protein, 8 aa, synthetic construct
  REGION 1..8: note = aprutumab ixadotin heavy chain CDR1
GFTFSSYA

SEQ ID NO: 5315 - protein, 8 aa, synthetic construct
  REGION 1..8: note = aprutumab ixadotin heavy chain CDR2
ISGSGTST

SEQ ID NO: 5316 - protein, 15 aa, synthetic construct
  REGION 1..15: note = aprutumab ixadotin heavy chain CDR3
ARVRYNWNHGDWFDP

SEQ ID NO: 5317 - protein, 110 aa, synthetic construct; identical to SEQ ID NO: 5309
  REGION 1..110: note = aprutumab ixadotin light chain V region

SEQ ID NO: 5318 - protein, 8 aa, synthetic construct
  REGION 1..8: note = aprutumab ixadotin light chain CDR1
SSNIGNNY

SEQ ID NO: 5319 - skipped

SEQ ID NO: 5320 - protein, 11 aa, synthetic construct
  REGION 1..11: note = aprutumab ixadotin light chain CDR3
SSWDDSLNYWV

SEQ ID NO: 5321 - protein, 118 aa, synthetic construct
  REGION 1..118: note = ascrinvacumab heavy chain V region
QVQLQESGPGLVKPSQTLSLTCTVSGGSISSGEYYWNWIRQHPGKGLEWIGYIYYSGSTYYNPSLKSRVTISVDTSKNQFSLKLSSVTAADTAVYYCARESVAGFDYWGQGTLVTVSS

SEQ ID NO: 5322 - protein, 10 aa, synthetic construct
  REGION 1..10: note = ascrinvacumab heavy chain CDR1
GGSISSGEYY

SEQ ID NO: 5323 - protein, 10 aa, synthetic construct
  REGION 1..10: note = ascrinvacumab heavy chain CDR2
IGYIYYSGST

SEQ ID NO: 5324 - protein, 10 aa, synthetic construct
  REGION 1..10: note = ascrinvacumab heavy chain CDR3
ARESVAGFDY

SEQ ID NO: 5325 - protein, 108 aa, synthetic construct
  REGION 1..108: note = ascrinvacumab light chain V region
EIVLTQSPGTLSLSPGERATLSCRASQSVSSSYLAWYQQKPGQAPRLLIYGTSSRATGIPDRFSGSGSGTDFTLTISRLEPEDFAVYYCQQYGSSPITFGQGTRLEIK

SEQ ID NO: 5326 - protein, 7 aa, synthetic construct
  REGION 1..7: note = ascrinvacumab light chain CDR1
QSVSSSY

SEQ ID NO: 5327 - skipped

SEQ ID NO: 5328 - protein, 9 aa, synthetic construct
  REGION 1..9: note = ascrinvacumab light chain CDR3
QQYGSSPIT

SEQ ID NO: 5329 - protein, 121 aa, synthetic construct
  REGION 1..121: note = astegolimab heavy chain V region
EVQLVQSGAEVKKPGESLKISCKGSGYSFTNYWIGWVRQMPGKGLEWMGIIYPGNSDTRFSPSFQGQVTISADKSITTAYLQWSSLKASDTAMYYCARHGTSSDYYGLDVWGQGTTVTVSS

SEQ ID NO: 5330 - protein, 8 aa, synthetic construct
  REGION 1..8: note = astegolimab heavy chain CDR1
GYSFTNYW

SEQ ID NO: 5331 - protein, 8 aa, synthetic construct
  REGION 1..8: note = astegolimab heavy chain CDR2
IYPGNSDT

SEQ ID NO: 5332 - protein, 14 aa, synthetic construct
  REGION 1..14: note = astegolimab heavy chain CDR3
ARHGTSSDYYGLDV

SEQ ID NO: 5333 - protein, 107 aa, synthetic construct
  REGION 1..107: note = astegolimab light chain V region
DIQMTQSPSSLSASVGDRVTITCQASQDISNYLNWYQQKPGKAPKLLIYDASNLETGVPSRFSGSGSGTDFTFTISSLQPEDIATYYCQQDDNFPLTFGGGTKVEIK

SEQ ID NO: 5334 - protein, 6 aa, synthetic construct
  REGION 1..6: note = astegolimab light chain CDR1
QDISNY

SEQ ID NO: 5335 - skipped

SEQ ID NO: 5336 - protein, 9 aa, synthetic construct
  REGION 1..9: note = astegolimab light chain CDR3
QQDDNFPLT

SEQ ID NO: 5337 - protein, 118 aa, synthetic construct [sequence omitted]

SEQ ID NO: 5338 - protein, 8 aa, synthetic construct
  REGION 1..8: note = atezolizumab heavy chain CDR1
GFTFSDSW

SEQ ID NO: 5339 - protein, 8 aa, synthetic construct
  REGION 1..8: note = atezolizumab heavy chain CDR2
ISPYGGST

SEQ ID NO: 5340 - protein, 11 aa, synthetic construct
  REGION 1..11: note = atezolizumab heavy chain CDR3
ARRHWPGGFDY

SEQ ID NO: 5341 - protein, 107 aa, synthetic construct [sequence omitted]

SEQ ID NO: 5342 - protein, 6 aa, synthetic construct
  REGION 1..6: note = atezolizumab light chain CDR1
QDVSTA

SEQ ID NO: 5343 - skipped

SEQ ID NO: 5344 - protein, 9 aa, synthetic construct
  REGION 1..9: note = atezolizumab light chain CDR3
QQYLYHPAT

SEQ ID NO: 5345 - protein, 119 aa, synthetic construct
  REGION 1..119: note = atidortoxumab heavy chain V region
EVQLQESGPGLVRPSETLSLTCAVSGYSISSGMGWGWIRQPPGKGLEWIGSIDQRGSTYYNPSLKSRVTISVDTSKNQFSLKLSSVTAADTAVYYCARDAGHAVDMDVWGKGTTVTVSS

SEQ ID NO: 5346 - protein, 9 aa, synthetic construct
  REGION 1..9: note = atidortoxumab heavy chain CDR1
GYSISSGMG

SEQ ID NO: 5347 - protein, 10 aa, synthetic construct
  REGION 1..10: note = atidortoxumab heavy chain CDR2
IGSIDQRGST

SEQ ID NO: 5348 - protein, 9 aa, synthetic construct
  REGION 1..9: note = atidortoxumab heavy chain CDR3
AGHAVDMDV

SEQ ID NO: 5349 - protein, 107 aa, synthetic construct
  REGION 1..107: note = atidortoxumab light chain V region
DIQMTQSPSSVSASVGDRVTITCRASQGISRWLAWYQQKPGKAPKLLIYAASSLQSGVPSRFSGSGSGTDFTLTISSLQPEDFATYYCQQGYVFPLTFGGGTKVEIK

SEQ ID NO: 5350 - protein, 6 aa, synthetic construct
  REGION 1..6: note = atidortoxumab light chain CDR1
QGISRW

SEQ ID NO: 5351 - skipped

SEQ ID NO: 5352 - protein, 9 aa, synthetic construct
  REGION 1..9: note = atidortoxumab light chain CDR3
QQGYVFPLT

SEQ ID NO: 5353 - protein, 114 aa, synthetic construct
  REGION 1..114: note = atinumab heavy chain V region
EVQLVESGGGLVQPGGSLRLSCAASGFTFSNYWMSWVRQAPGKGLEWVATIKQDGSQKNYVDSVKGRFTISRDNAKNSLYLRLNSLRAEDTAVYYCATELFDLWGRGSLVTVSS

SEQ ID NO: 5354 - protein, 8 aa, synthetic construct
  REGION 1..8: note = atinumab heavy chain CDR1
GFTFSNYW

SEQ ID NO: 5355 - protein, 8 aa, synthetic construct
  REGION 1..8: note = atinumab heavy chain CDR2
IKQDGSQK

SEQ ID NO: 5356 - protein, 7 aa, synthetic construct
  REGION 1..7: note = atinumab heavy chain CDR3
ATELFDL

SEQ ID NO: 5357 - protein, 107 aa, synthetic construct
  REGION 1..107: note = atinumab light chain V region
EIVLTQSPATLSLSPGERATLSCRASQSVSSYLAWYQQKPGQAPRLLIYDASNRATGIPARFSGSGSGTDFTLTISSLEPEDFAVYYCQQRSNWPITFGQGTKLEIK

SEQ ID NO: 5358 - protein, 6 aa, synthetic construct
  REGION 1..6: note = atinumab light chain CDR1
QSVSSY

SEQ ID NO: 5359 - skipped

SEQ ID NO: 5360 - protein, 9 aa, synthetic construct
  REGION 1..9: note = atinumab light chain CDR3
QQRSNWPIT

SEQ ID NO: 5361 - protein, 116 aa, synthetic construct
  REGION 1..116: note = atoltivimab heavy chain V region
QVQLVESGGGVVQPGRSLRLSCAASGFTFNNYGMHWVRQAPGMGLEWVAVIWHDGSDKYYADSVKGRFTISRDNSKNTLYLQMNSLRAEDTAVYYCARNWNLFDYWGQGTLVTVSS

SEQ ID NO: 5362 - protein, 8 aa, synthetic construct
  REGION 1..8: note = atoltivimab heavy chain CDR1
GFTFNNYG

SEQ ID NO: 5363 - protein, 8 aa, synthetic construct
  REGION 1..8: note = atoltivimab heavy chain CDR2
IWHDGSDK

SEQ ID NO: 5364 - protein, 9 aa, synthetic construct
  REGION 1..9: note = atoltivimab heavy chain CDR3
ARNWNLFDY

SEQ ID NO: 5365 - protein, 108 aa, synthetic construct
  REGION 1..108: note = atoltivimab light chain V region
DIQMTQSPSSLSASVGDRITITCRASQSISTYLHWYQQKPGKAPKLLIYAASTLQSGVPSRFSGSGSGTDFTLTISSLQPEDFATYYCQQSFSTPPINFGQGTKLEIK

SEQ ID NO: 5366 - protein, 6 aa, synthetic construct
  REGION 1..6: note = atoltivimab light chain CDR1
QSISTY

SEQ ID NO: 5367 - skipped

SEQ ID NO: 5368 - protein, 10 aa, synthetic construct
  REGION 1..10: note = atoltivimab light chain CDR3
QQSFSTPPIN

SEQ ID NO: 5369 - protein, 124 aa, synthetic construct
  REGION 1..124: note = avdoralimab heavy chain V region
EVQLVESGGGLVQPGGSLRLSCAASGFTFSSYVMHWVRQATGKGLEWVSAIDTGGGTYYADSVKGRFTISRENAKNSLYLQMNSLRAGDTAVYYCARDYYYYASGSYYKAFDIWGQGTMVTVSS

SEQ ID NO: 5370 - protein, 8 aa, synthetic construct
  REGION 1..8: note = avdoralimab heavy chain CDR1
GFTFSSYV

SEQ ID NO: 5371 - protein, 7 aa, synthetic construct
  REGION 1..7: note = avdoralimab heavy chain CDR2
IDTGGGT

SEQ ID NO: 5372 - protein, 11 aa, synthetic construct
  REGION 1..11: note = avdoralimab heavy chain CDR3
ASGSYYKAFDI

SEQ ID NO: 5373 - protein, 107 aa, synthetic construct
  REGION 1..107: note = avdoralimab light chain V region
EIVLTQSPGTLSLSPGERATLSCRASQSVSSRYLAWYQQKPGQAPRLLIYGASSRATGIPDRFSGSGSGTDFTLTISRLEPEDFAVYYCQQYGSPLTFGQGTKLEIK

SEQ ID NO: 5374 - protein, 7 aa, synthetic construct
  REGION 1..7: note = avdoralimab light chain CDR1
QSVSSRY

SEQ ID NO: 5375 - skipped

SEQ ID NO: 5376 - protein, 8 aa, synthetic construct
  REGION 1..8: note = avdoralimab light chain CDR3
QQYGSPLT

SEQ ID NO: 5377 - protein, 120 aa, synthetic construct
  REGION 1..120: note = avelumab heavy chain V region
EVQLLESGGGLVQPGGSLRLSCAASGFTFSSYIMMWVRQAPGKGLEWVSSIYPSGGITFYADTVKGRFTISRDNSKNTLYLQMNSLRAEDTAVYYCARIKLGTVTTVDYWGQGTLVTVSS

SEQ ID NO: 5378 - protein, 8 aa, synthetic construct
  REGION 1..8: note = avelumab heavy chain CDR1
GFTFSSYI

SEQ ID NO: 5379 - protein, 8 aa, synthetic construct
  REGION 1..8: note = avelumab heavy chain CDR2
IYPSGGIT

SEQ ID NO: 5380 - protein, 13 aa, synthetic construct
  REGION 1..13: note = avelumab heavy chain CDR3
ARIKLGTVTTVDY

SEQ ID NO: 5381 - protein, 110 aa, synthetic construct
  REGION 1..110: note = avelumab light chain V region
QSALTQPASVSGSPGQSITISCTGTSSDVGGYNYVSWYQQHPGKAPKLMIYDVSNRPSGVSNRFSGSKSGNTASLTISGLQAEDEADYYCSSYTSSSTRVFGTGTKVTVL

SEQ ID NO: 5382 - protein, 9 aa, synthetic construct
  REGION 1..9: note = avelumab light chain CDR1
SSDVGGYNY

SEQ ID NO: 5383 - skipped

SEQ ID NO: 5384 - protein, 10 aa, synthetic construct
  REGION 1..10: note = avelumab light chain CDR3
SSYTSSSTRV

SEQ ID NO: 5385 - protein, 113 aa, synthetic construct
  REGION 1..113: note = balstilimab heavy chain V region
QVQLVESGGGVVQPGRSLRLSCAASGFTFSSYGMHWVRQAPGKGLEWVAVIWYDGSNKYYADSVKGRFTISRDNSKNTLYLQMNSLRAEDTAVYYCASNGDHWGQGTLVTVSS

SEQ ID NO: 5386 - protein, 8 aa, synthetic construct
  REGION 1..8: note = balstilimab heavy chain CDR1
GFTFSSYG

SEQ ID NO: 5387 - protein, 8 aa, synthetic construct
  REGION 1..8: note = balstilimab heavy chain CDR2
IWYDGSNK

SEQ ID NO: 5388 - protein, 6 aa, synthetic construct
  REGION 1..6: note = balstilimab heavy chain CDR3
ASNGDH

SEQ ID NO: 5389 - protein, 107 aa, synthetic construct
  REGION 1..107: note = balstilimab light chain V region
EIVMTQSPATLSVSPGERATLSCRASQSVSSNLAWYQQKPGQAPRLLIYGASTRATGIPARFSGSGSGTEFTLTISSLQSEDFAVYYCQQYNNWPRTFGQGTKVEIK

SEQ ID NO: 5390 - protein, 6 aa, synthetic construct
  REGION 1..6: note = balstilimab light chain CDR1
QSVSSN

SEQ ID NO: 5391 - skipped

SEQ ID NO: 5392 - protein, 9 aa, synthetic construct
  REGION 1..9: note = balstilimab light chain CDR3
QQYNNWPRT

SEQ ID NO: 5393 - protein, 125 aa, synthetic construct; identical to SEQ ID NO: 440
  REGION 1..125: note = bamlanivimab heavy chain V region

SEQ ID NO: 5394 - protein, 8 aa, synthetic construct
  REGION 1..8: note = bamlanivimab heavy chain CDR1
GGTFSNYA

SEQ ID NO: 5395 - protein, 9 aa, synthetic construct
  REGION 1..9: note = bamlanivimab heavy chain CDR2
IIPILGIAN

SEQ ID NO: 5396 - protein, 18 aa, synthetic construct
  REGION 1..18: note = bamlanivimab heavy chain CDR3
ARGYYEARHYYYYYAMDV

SEQ ID NO: 5397 - protein, 107 aa, synthetic construct; identical to SEQ ID NO: 439
  REGION 1..107: note = bamlanivimab light chain V region

SEQ ID NO: 5398 - protein, 6 aa, synthetic construct
  REGION 1..6: note = bamlanivimab light chain CDR1
QSISSY

SEQ ID NO: 5399 - skipped

SEQ ID NO: 5400 - protein, 9 aa, synthetic construct
  REGION 1..9: note = bamlanivimab light chain CDR3
QQSYSTPRT

SEQ ID NO: 5401 - protein, 120 aa, synthetic construct
  REGION 1..120: note = bapotulimab heavy chain V region
QVQLVQSGAEVKKPGSSVKVSCKASGGTFSSYAISWVRQAPGQGLEWMGGIIPILGIANYAQKFQGRVTITADKSTSTAYMELSSLRSEDTAVYYCARGRLPYGDFWDSWGQGTLVTVSS

SEQ ID NO: 5402 - protein, 8 aa, synthetic construct
  REGION 1..8: note = bapotulimab heavy chain CDR1
GGTFSSYA

SEQ ID NO: 5403 - protein, 8 aa, synthetic construct
  REGION 1..8: note = bapotulimab heavy chain CDR2
IIPILGIA

SEQ ID NO: 5404 - protein, 13 aa, synthetic construct
  REGION 1..13: note = bapotulimab heavy chain CDR3
ARGRLPYGDFWDS

SEQ ID NO: 5405 - protein, 112 aa, synthetic construct
  REGION 1..112: note = bapotulimab light chain V region
DIVMTQSPLSLPVTPGEPASISCRSSQSLLYSNGYNYLDWYLQKPGQSPQLLIYLGSNRASGVPDRFSGSGSGTDFTLKISRVEAEDVGVYYCMQALQTPLTFGGGTKLEIR

SEQ ID NO: 5406 - protein, 11 aa, synthetic construct
  REGION 1..11: note = bapotulimab light chain CDR1
QSLLYSNGYNY

SEQ ID NO: 5407 - skipped

SEQ ID NO: 5408 - protein, 9 aa, synthetic construct
  REGION 1..9: note = bapotulimab light chain CDR3
MQALQTPLT

SEQ ID NO: 5409 - protein, 121 aa, synthetic construct
  REGION 1..121: note = barecetamab heavy chain V region
EVQLLESGGGLVQPGGSLRLSCAASGFTFSDYDMSWVRQAPGKGLEWVSTIDLDSGSIYYADSVQGRFTISRDNSKNTLYLQMNSLRAEDTAVYYCAKDLHMGPEGPFDYWGQGTLVTVSS

SEQ ID NO: 5410 - protein, 8 aa, synthetic construct
  REGION 1..8: note = barecetamab heavy chain CDR1
GFTFSDYD

SEQ ID NO: 5411 - protein, 8 aa, synthetic construct
  REGION 1..8: note = barecetamab heavy chain CDR2
IDLDSGSI

SEQ ID NO: 5412 - protein, 14 aa, synthetic construct
  REGION 1..14: note = barecetamab heavy chain CDR3
AKDLHMGPEGPFDY

SEQ ID NO: 5413 - protein, 110 aa, synthetic construct
  REGION 1..110: note = barecetamab light chain V region
QSVLTQPPSASGTPGQRVTISCSGSSSNIGSNSVSWYQQLPGTAPKLLIYSDNHRPSGVPDRFSGSKSGTSASLAISGLRSEDEADYYCQGWDTSLSGHVFGGGTKLTVL

SEQ ID NO: 5414 - protein, 8 aa, synthetic construct
  REGION 1..8: note = barecetamab light chain CDR1
SSNIGSNS

SEQ ID NO: 5415 - skipped

SEQ ID NO: 5416 - protein, 11 aa, synthetic construct
  REGION 1..11: note = barecetamab light chain CDR3
QGWDTSLSGHV

SEQ ID NO: 5417 - protein, 121 aa, synthetic construct
  REGION 1..121: note = batoclimab heavy chain V region
QLLLQESGPGLVKPSETLSLTCTVSGGSLSSSFSYWVWIRQPPGKGLEWIGTIYYSGNTYYNPSLKSRLTISVDTSKNHFSLKLSSVTAADTAVYYCARRAGILTGYLDSWGQGTLVTVSS

SEQ ID NO: 5418 - protein, 10 aa, synthetic construct
  REGION 1..10: note = batoclimab heavy chain CDR1
GGSLSSSFSY

SEQ ID NO: 5419 - protein, 8 aa, synthetic construct
  REGION 1..8: note = batoclimab heavy chain CDR2
TIYYSGNT

SEQ ID NO: 5420 - protein, 13 aa, synthetic construct
  REGION 1..13: note = batoclimab heavy chain CDR3
ARRAGILTGYLDS

SEQ ID NO: 5421 - protein, 108 aa, synthetic construct
  REGION 1..108: note = batoclimab light chain V region
SYVLTQSPSVSVAPGQTARITCGGNNIGSKSVHWYQQKPGQAPVLVVYDDSDRPSGIPERFSASNSGNTATLTISRVEAGDEADYYCQVWDSSSDHVVFGGGTKLTVL

SEQ ID NO: 5422 - protein, 6 aa, synthetic construct
  REGION 1..6: note = batoclimab light chain CDR1
NIGSKS

SEQ ID NO: 5423 - skipped

SEQ ID NO: 5424 - protein, 11 aa, synthetic construct
  REGION 1..11: note = batoclimab light chain CDR3
QVWDSSSDHVV

SEQ ID NO: 5425 - protein, 117 aa, synthetic construct
  REGION 1..117: note = befovacimab heavy chain V region
EVQLVESGGGLVQPGGSLRLSCAASGFTFSSYGMDWVRQAPGKGLEWVSSIRGSRGSTYYADSVKGRFTISRDNSKNTLYLQMNSLRAEDTAVYYCARLYRYWFDYWGQGTLVTVSS

SEQ ID NO: 5426 - protein, 8 aa, synthetic construct
  REGION 1..8: note = befovacimab heavy chain CDR1
GFTFSSYG

SEQ ID NO: 5427 - protein, 8 aa, synthetic construct
  REGION 1..8: note = befovacimab heavy chain CDR2
IRGSRGST

SEQ ID NO: 5428 - protein, 10 aa, synthetic construct
  REGION 1..10: note = befovacimab heavy chain CDR3
ARLYRYWFDY

SEQ ID NO: 5429 - protein, 106 aa, synthetic construct
  REGION 1..106: note = befovacimab light chain V region
SYELTQPPSVSVSPGQTARITCSGDNLPKYYAHWYQQKPGQAPVVVIFYDVNRPSGIPERFSGSNSGNTATLTISGTQAMDEADYYCQAWWSSTPVFGGGTKLTVL

SEQ ID NO: 5430 - protein, 6 aa, synthetic construct
  REGION 1..6: note = befovacimab light chain CDR1
NLPKYY

SEQ ID NO: 5431 - skipped

SEQ ID NO: 5432 - protein, 8 aa, synthetic construct
  REGION 1..8: note = befovacimab light chain CDR3
AWWSSTPV

SEQ ID NO: 5433 - protein, 121 aa, synthetic construct
  REGION 1..121: note = belantamab heavy chain V region
QVQLVQSGAEVKKPGSSVKVSCKASGGTFSNYWMHWVRQAPGQGLEWMGATYRGHSDTYYNQKFKGRVTITADKSTSTAYMELSSLRSEDTAVYYCARGAIYDGYDVLDNWGQGTLVTVSS

SEQ ID NO: 5434 - protein, 8 aa, synthetic construct
  REGION 1..8: note = belantamab heavy chain CDR1
GGTFSNYW

SEQ ID NO: 5435 - protein, 8 aa, synthetic construct
  REGION 1..8: note = belantamab heavy chain CDR2
TYRGHSDT

SEQ ID NO: 5436 - protein, 14 aa, synthetic construct
  REGION 1..14: note = belantamab heavy chain CDR3
ARGAIYDGYDVLDN

SEQ ID NO: 5437 - protein, 107 aa, synthetic construct
  REGION 1..107: note = belantamab light chain V region
DIQMTQSPSSLSASVGDRVTITCSASQDISNYLNWYQQKPGKAPKLLIYYTSNLHSGVPSRFSGSGSGTDFTLTISSLQPEDFATYYCQQYRKLPWTFGQGTKLEIK

SEQ ID NO: 5438 - protein, 6 aa, synthetic construct
  REGION 1..6: note = belantamab light chain CDR1
QDISNY

SEQ ID NO: 5439 - skipped

SEQ ID NO: 5440 - protein, 9 aa, synthetic construct
  REGION 1..9: note = belantamab light chain CDR3
QQYRKLPWT

SEQ ID NO: 5441 - protein, 123 aa, synthetic construct
  REGION 1..123: note = belimumab heavy chain V region
QVQLQQSGAEVKKPGSSVRVSCKASGGTFNNNAINWVRQAPGQGLEWMGGIIPMFGTAKYSQNFQGRVAITADESTGTASMELSSLRSEDTAVYYCARSRDLLLFPHHALSPWGRGTMVTVSS

SEQ ID NO: 5442 - protein, 8 aa, synthetic construct
  REGION 1..8: note = belimumab heavy chain CDR1
GGTFNNNA

SEQ ID NO: 5443 - protein, 8 aa, synthetic construct
  REGION 1..8: note = belimumab heavy chain CDR2
IIPMFGTA

SEQ ID NO: 5444 - protein, 16 aa, synthetic construct
  REGION 1..16: note = belimumab heavy chain CDR3
ARSRDLLLFPHHALSP

SEQ ID NO: 5445 - protein, 108 aa, synthetic construct
  REGION 1..108: note = belimumab light chain V region
SSELTQDPAVSVALGQTVRVTCQGDSLRSYYASWYQQKPGQAPVLVIYGKNNRPSGIPDRFSGSSSGNTASLTITGAQAEDEADYYCSSRDSSGNHWVFGGGTELTVL

SEQ ID NO: 5446 - protein, 6 aa, synthetic construct
  REGION 1..6: note = belimumab light chain CDR1
SLRSYY

SEQ ID NO: 5447 - skipped

SEQ ID NO: 5448 - protein, 11 aa, synthetic construct
  REGION 1..11: note = belimumab light chain CDR3
SSRDSSGNHWV

SEQ ID NO: 5449 - protein, 121 aa, synthetic construct [sequence omitted]

SEQ ID NO: 5450 - protein, 8 aa, synthetic construct
  REGION 1..8: note = benralizumab heavy chain CDR1
GYTFTSYV

SEQ ID NO: 5451 - protein, 8 aa, synthetic construct
  REGION 1..8: note = benralizumab heavy chain CDR2
INPYNDGT

SEQ ID NO: 5452 - protein, 14 aa, synthetic construct
  REGION 1..14: note = benralizumab heavy chain CDR3
GREGIRYYGLLGDY

SEQ ID NO: 5453 - protein, 107 aa, synthetic construct [sequence omitted]

SEQ ID NO: 5454 - protein, 6 aa, synthetic construct
  REGION 1..6: note = benralizumab light chain CDR1
EDIINY

SEQ ID NO: 5455 - skipped

SEQ ID NO: 5456 - protein, 9 aa, synthetic construct
  REGION 1..9: note = benralizumab light chain CDR3
QQGYTLPYT

SEQ ID NO: 5457 - protein, 128 aa, synthetic construct
  REGION 1..128: note = bentracimab heavy chain V region
QVQLQESGAEVKKPGSSVRVSCKASGGTFDSYSIHWVRQAPGQGLEWMGGIIPAFGTLSSAQDFQARVTISADKSTSTAYMELSGLRSEDTAVYYCARGSFDYYFWSASHPPNDALAIWGQGTLVTVS

SEQ ID NO: 5458 - protein, 8 aa, synthetic construct
  REGION 1..8: note = bentracimab heavy chain CDR1
GGTFDSYS

SEQ ID NO: 5459 - protein, 8 aa, synthetic construct
  REGION 1..8: note = bentracimab heavy chain CDR2
IIPAFGTL

SEQ ID NO: 5460 - protein, 22 aa, synthetic construct
  REGION 1..22: note = bentracimab heavy chain CDR3
ARGSFDYYFWSASHPPNDALAI

SEQ ID NO: 5461 - protein, 110 aa, synthetic construct
  REGION 1..110: note = bentracimab light chain V region
QSVVTQPPSVSAAPGQKVTISCSGSNSDIGNNYVSWYQQLPGTAPKLLIYDNNKRPSGIPDRFSGSKSGTSATLAITGLQAGDEADYYCGTWLYDRAVGLFGGGTKVTVL

SEQ ID NO: 5462 - protein, 8 aa, synthetic construct
  REGION 1..8: note = bentracimab light chain CDR1
NSDIGNNY

SEQ ID NO: 5463 - skipped

SEQ ID NO: 5464 - protein, 11 aa, synthetic construct
  REGION 1..11: note = bentracimab light chain CDR3
GTWLYDRAVGL

SEQ ID NO: 5465 - protein, 119 aa, synthetic construct
  REGION 1..119: note = berlimatoxumab heavy chain V region
ELQLQESGPGLVKPSETLSLTCTVSGGSISSGSYYWDWIRQPPGKGLEWIGNIYKSGSTYYNPSLKSRVTISVDTSKNQFSLKLSSVTAADTAVYYCARERGMHYMDVWGKGTTVTVSS

SEQ ID NO: 5466 - protein, 10 aa, synthetic construct
  REGION 1..10: note = berlimatoxumab heavy chain CDR1
GGSISSGSYY

SEQ ID NO: 5467 - protein, 7 aa, synthetic construct
  REGION 1..7: note = berlimatoxumab heavy chain CDR2
IYKSGST

SEQ ID NO: 5468 - protein, 11 aa, synthetic construct
  REGION 1..11: note = berlimatoxumab heavy chain CDR3
ARERGMHYMDV

SEQ ID NO: 5469 - protein, 107 aa, synthetic construct
  REGION 1..107: note = berlimatoxumab light chain V region
DIQMTQSPSSLSASVGDRVTITCRASQSINSYLNWYQQKPGKAPKLLIYAASSLQSGVPSRFSGSGSGTDFTLTISSLQPEDFATYYCQQQFDPPFTFGGGTKVEIK

SEQ ID NO: 5470 - protein, 6 aa, synthetic construct
  REGION 1..6: note = berlimatoxumab light chain CDR1
QSINSY

SEQ ID NO: 5471 - skipped

SEQ ID NO: 5472 - protein, 8 aa, synthetic construct
  REGION 1..8: note = berlimatoxumab light chain CDR3
QQFDPPFT

SEQ ID NO: 5473 - protein, 117 aa, synthetic construct
  REGION 1..117: note = bersanlimab heavy chain V region
EVQLLESGGGLVQPGGSLRLSCAASGFTFSNAWMSWVRQAPGKGLEWVAFIWYDGSNKYYADSVKGRFTISRDNSKNTLYLQMNSLRAEDTAVYYCARYSGWYFDYWGQGTLVTVSS

SEQ ID NO: 5474 - protein, 8 aa, synthetic construct
  REGION 1..8: note = bersanlimab heavy chain CDR1
GFTFSNAW

SEQ ID NO: 5475 - protein, 8 aa, synthetic construct
  REGION 1..8: note = bersanlimab heavy chain CDR2
IWYDGSNK

SEQ ID NO: 5476 - protein, 10 aa, synthetic construct
  REGION 1..10: note = bersanlimab heavy chain CDR3
ARYSGWYFDY

SEQ ID NO: 5477 - protein, 111 aa, synthetic construct
  REGION 1..111: note = bersanlimab light chain V region
QSVLTQPPSASGTPGQRVTISCTGSSSNIGAGYDVHWYQQLPGTAPKLLIYDNNNRPSGVPDRFSGSKSGTSASLAISGLRSEDEADYYCQSYDSSLSAWLFGGGTKLTVL

SEQ ID NO: 5478 - protein, 9 aa, synthetic construct
  REGION 1..9: note = bersanlimab light chain CDR1
SSNIGAGYD

SEQ ID NO: 5479 - skipped

SEQ ID NO: 5480 - protein, 10 aa, synthetic construct
  REGION 1..10: note = bersanlimab light chain CDR3
QSYDSSLSAW

SEQ ID NO: 5481 - protein, 123 aa, synthetic construct [sequence omitted]

SEQ ID NO: 5482 - protein, 8 aa, synthetic construct
  REGION 1..8: note = bevacizumab heavy chain CDR1
GYTFTNYG

SEQ ID NO: 5483 - protein, 8 aa, synthetic construct
  REGION 1..8: note = bevacizumab heavy chain CDR2
INTYTGEP

SEQ ID NO: 5484 - protein, 16 aa, synthetic construct
  REGION 1..16: note = bevacizumab heavy chain CDR3
AKYPHYYGSSHWYFDV

SEQ ID NO: 5485 - protein, 107 aa, synthetic construct [sequence omitted]

SEQ ID NO: 5486 - protein, 6 aa, synthetic construct
  REGION 1..6: note = bevacizumab light chain CDR1
QDISNY

SEQ ID NO: 5487 - skipped

SEQ ID NO: 5488 - protein, 9 aa, synthetic construct
  REGION 1..9: note = bevacizumab light chain CDR3
QQYSTVPWT

SEQ ID NO: 5489 - protein, 119 aa, synthetic construct
  REGION 1..119: note = bezlotoxumab heavy chain V region
EVQLVQSGAEVKKSGESLKISCKGSGYSFTSYWIGWVRQMPGKGLEWMGIFYPGDSSTRYSPSFQGQVTISADKSVNTAYLQWSSLKASDTAMYYCARRRNWGNAFDIWGQGTMVTVSS

SEQ ID NO: 5490 - protein, 7 aa, synthetic construct
  REGION 1..7: note = bezlotoxumab heavy chain CDR1
YSFTSYW

SEQ ID NO: 5491 - protein, 9 aa, synthetic construct
  REGION 1..9: note = bezlotoxumab heavy chain CDR2
IFYPGDSST

SEQ ID NO: 5492 - protein, 12 aa, synthetic construct
  REGION 1..12: note = bezlotoxumab heavy chain CDR3
ARRRNWGNAFDI

SEQ ID NO: 5493 - protein, 108 aa, synthetic construct
  REGION 1..108: note = bezlotoxumab light chain V region
EIVLTQSPGTLSLSPGERATLSCRASQSVSSSYLAWYQQKPGQAPRLLIYGASSRATGIPDRFSGSGSGTDFTLTISRLEPEDFAVYYCQQYGSSTWTFGQGTKVEIK

SEQ ID NO: 5494 - protein, 7 aa, synthetic construct
  REGION 1..7: note = bezlotoxumab light chain CDR1
QSVSSSY

SEQ ID NO: 5495 - skipped

SEQ ID NO: 5496 - protein, 9 aa, synthetic construct
  REGION 1..9: note = bezlotoxumab light chain CDR3
QQYGSSTWT

SEQ ID NO: 5497 - protein, 115 aa, synthetic construct [sequence omitted]

SEQ ID NO: 5498 - protein, 8 aa, synthetic construct
  REGION 1..8: note = bimagrumab heavy chain CDR1
GYTFTSSY

SEQ ID NO: 5499 - protein, 8 aa, synthetic construct
  REGION 1..8: note = bimagrumab heavy chain CDR2
INPVSGST

SEQ ID NO: 5500 - protein, 8 aa, synthetic construct
  REGION 1..8: note = bimagrumab heavy chain CDR3
ARGGWFDY

SEQ ID NO: 5501 - protein, 111 aa, synthetic construct [sequence omitted]

SEQ ID NO: 5502 - protein, 9 aa, synthetic construct
  REGION 1..9: note = bimagrumab light chain CDR1
SSDVGSYNY

SEQ ID NO: 5503 - skipped

SEQ ID NO: 5504 - protein, 11 aa, synthetic construct
  REGION 1..11: note = bimagrumab light chain CDR3
GTFAGGSYYGV

SEQ ID NO: 5505 - protein, 125 aa, synthetic construct
  REGION 1..125: note = bimekizumab heavy chain V region
EVQLVESGGGLVQPGGSLRLSCAASGFTFSDYNMAWVRQAPGKGLEWVATITYEGRNTYYRDSVKGRFTISRDNAKNSLYLQMNSLRAEDTAVYYCASPPQYYEGSIYRLWFAHWGQGTLVTVSS

SEQ ID NO: 5506 - protein, 8 aa, synthetic construct
  REGION 1..8: note = bimekizumab heavy chain CDR1
GFTFSDYN

SEQ ID NO: 5507 - protein, 8 aa, synthetic construct
  REGION 1..8: note = bimekizumab heavy chain CDR2
ITYEGRNT

SEQ ID NO: 5508 - protein, 18 aa, synthetic construct
  REGION 1..18: note = bimekizumab heavy chain CDR3
ASPPQYYEGSIYRLWFAH

SEQ ID NO: 5509 - protein, 107 aa, synthetic construct
  REGION 1..107: note = bimekizumab light chain V region
AIQLTQSPSSLSASVGDRVTITCRADESVRTLMHWYQQKPGKAPKLLIYLVSNSEIGVPDRFSGSGSGTDFRLTISSLQPEDFATYYCQQTWSDPWTFGQGTKVEIK

SEQ ID NO: 5510 - protein, 6 aa, synthetic construct
  REGION 1..6: note = bimekizumab light chain CDR1
ESVRTL

SEQ ID NO: 5511 - skipped

SEQ ID NO: 5512 - protein, 9 aa, synthetic construct
  REGION 1..9: note = bimekizumab light chain CDR3
QQTWSDPWT

SEQ ID NO: 5513 - protein, 120 aa, synthetic construct; identical to SEQ ID NO: 5377
  REGION 1..120: note = bintrafusp alfa heavy chain V region

SEQ ID NO: 5514 - protein, 8 aa, synthetic construct
  REGION 1..8: note = bintrafusp alfa heavy chain CDR1
GFTFSSYI

SEQ ID NO: 5515 - protein, 8 aa, synthetic construct
  REGION 1..8: note = bintrafusp alfa heavy chain CDR2
IYPSGGIT

SEQ ID NO: 5516 - protein, 13 aa, synthetic construct
  REGION 1..13: note = bintrafusp alfa heavy chain CDR3
ARIKLGTVTTVDY

SEQ ID NO: 5517 - protein, 110 aa, synthetic construct; identical to SEQ ID NO: 5381
  REGION 1..110: note = bintrafusp alfa light chain V region

SEQ ID NO: 5518 - protein, 9 aa, synthetic construct
  REGION 1..9: note = bintrafusp alfa light chain CDR1
SSDVGGYNY

SEQ ID NO: 5519 - skipped

SEQ ID NO: 5520 - protein, 11 aa, synthetic construct
  REGION 1..11: note = bintrafusp alfa light chain CDR3
SSYTSSSTRVF

SEQ ID NO: 5521 - protein, 121 aa, synthetic construct
  REGION 1..121: note = bleselumab heavy chain V region
QLQLQESGPGLLKPSETLSLTCTVSGGSISSPGYYGGWIRQPPGKGLEWIGSIYKSGSTYHNPSLKSRVTISVDTSKNQFSLKLSSVTAADTAVYYCTRPVVRYFGWFDPWGQGTLVTVSS

SEQ ID NO: 5522 - protein, 9 aa, synthetic construct
  REGION 1..9: note = bleselumab heavy chain CDR1
GGSISSPGY

SEQ ID NO: 5523 - protein, 7 aa, synthetic construct
  REGION 1..7: note = bleselumab heavy chain CDR2
IYKSGST

SEQ ID NO: 5524 - protein, 13 aa, synthetic construct
  REGION 1..13: note = bleselumab heavy chain CDR3
TRPVVRYFGWFDP

SEQ ID NO: 5525 - protein, 106 aa, synthetic construct
  REGION 1..106: note = bleselumab light chain V region
AIQLTQSPSSLSASVGDRVTITCRASQGISSALAWYQQKPGKAPKLLIYDASNLESGVPSRFSGSGSGTDFTLTISSLQPEDFATYYCQQFNSYPTFGQGTKVEIK

SEQ ID NO: 5526 - protein, 6 aa, synthetic construct
  REGION 1..6: note = bleselumab light chain CDR1
QGISSA

SEQ ID NO: 5527 - skipped

SEQ ID NO: 5528 - protein, 8 aa, synthetic construct
  REGION 1..8: note = bleselumab light chain CDR3
QQFNSYPT

SEQ ID NO: 5529 - protein, 118 aa, synthetic construct
  REGION 1..118: note = botensilimab heavy chain V region
EVQLVESGGGLVKPGGSLRLSCAASGFTFSSYSMNWVRQAPGKGLEWVSSISSSSSYIYYAESVKGRFTISRDNAKNSLYLQMNSLRAEDTAVYYCARVGLFGPFDIWGQGTLVTVSS

SEQ ID NO: 5530 - protein, 8 aa, synthetic construct
  REGION 1..8: note = botensilimab heavy chain CDR1
GFTFSSYS

SEQ ID NO: 5531 - protein, 8 aa, synthetic construct
  REGION 1..8: note = botensilimab heavy chain CDR2
ISSSSSYI

SEQ ID NO: 5532 - protein, 11 aa, synthetic construct
  REGION 1..11: note = botensilimab heavy chain CDR3
ARVGLFGPFDI

SEQ ID NO: 5533 - protein, 107 aa, synthetic construct
  REGION 1..107: note = botensilimab light chain V region
EIVLTQSPGTLSLSPGERATLSCRASQSVSRYLGWYQQKPGQAPRLLIYGASTRATGIPDRFSGSGSGTDFTLTITRLEPEDFAVYYCQQYGSSPWTFGQGTKVEIK

SEQ ID NO: 5534 - protein, 6 aa, synthetic construct
  REGION 1..6: note = botensilimab light chain CDR1
QSVSRY

SEQ ID NO: 5535 - skipped

SEQ ID NO: 5536 - protein, 9 aa, synthetic construct
  REGION 1..9: note = botensilimab light chain CDR3
QQYGSSPWT

SEQ ID NO: 5537 - protein, 124 aa, synthetic construct
  REGION 1..124: note = brazikumab heavy chain V region
QVQLVESGGGVVQPGRSLRLSCAASGFTFSSYGMHWVRQAPGKGLEWVAVIWYDGSNEYYADSVKGRFTISRDNSKNTLYLQMNSLRAEDTAVYYCARDRGYTSSWYPDAFDIWGQGTMVTVSS

SEQ ID NO: 5538 - protein, 8 aa, synthetic construct
  REGION 1..8: note = brazikumab heavy chain CDR1
GFTFSSYG

SEQ ID NO: 5539 - protein, 8 aa, synthetic construct
  REGION 1..8: note = brazikumab heavy chain CDR2
IWYDGSNE

SEQ ID NO: 5540 - protein, 17 aa, synthetic construct
  REGION 1..17: note = brazikumab heavy chain CDR3
ARDRGYTSSWYPDAFDI

SEQ ID NO: 5541 - protein, 111 aa, synthetic construct
  REGION 1..111: note = brazikumab light chain V region
QSVLTQPPSVSGAPGQRVTISCTGSSSNTGAGYDVHWYQQVPGTAPKLLIYGSGNRPSGVPDRFSGSKSGTSASLAITGLQAEDEADYYCQSYDSSLSGWVFGGGTRLTVL

SEQ ID NO: 5542 - protein, 10 aa, synthetic construct
  REGION 1..10: note = brazikumab light chain CDR1
SSSNTGAGYD

SEQ ID NO: 5543 - skipped

SEQ ID NO: 5544 - protein, 11 aa, synthetic construct
  REGION 1..11: note = brazikumab light chain CDR3
QSYDSSLSGWV

SEQ ID NO: 5545 - protein, 117 aa, synthetic construct
  REGION 1..117: note = brentuximab vedotin heavy chain V region
QIQLQQSGPEVVKPGASVKISCKASGYTFTDYYITWVKQKPGQGLEWIGWIYPGSGNTKYNEKFKGKATLTVDTSSSTAFMQLSSLTSEDTAVYFCANYGNYWFAYWGQGTQVTVSA

SEQ ID NO: 5546 - protein, 8 aa, synthetic construct
  REGION 1..8: note = brentuximab vedotin heavy chain CDR1
GYTFTDYY

SEQ ID NO: 5547 - protein, 8 aa, synthetic construct
  REGION 1..8: note = brentuximab vedotin heavy chain CDR2
IYPGSGNT

SEQ ID NO: 5548 - protein, 10 aa, synthetic construct
  REGION 1..10: note = brentuximab vedotin heavy chain CDR3
ANYGNYWFAY

SEQ ID NO: 5549 - protein, 111 aa, synthetic construct
  REGION 1..111: note = brentuximab vedotin light chain V region
DIVLTQSPASLAVSLGQRATISCKASQSVDFDGDSYMNWYQQKPGQPPKVLIYAASNLESGIPARFSGSGSGTDFTLNIHPVEEEDAATYYCQQSNEDPWTFGGGTKLEIK

SEQ ID NO: 5550 - protein, 10 aa, synthetic construct
  REGION 1..10: note = brentuximab vedotin light chain CDR1
QSVDFDGDSY

SEQ ID NO: 5551 - skipped

SEQ ID NO: 5552 - protein, 9 aa, synthetic construct
  REGION 1..9: note = brentuximab vedotin light chain CDR3
QQSNEDPWT

SEQ ID NO: 5553 - protein, 115 aa, synthetic construct [sequence omitted]

SEQ ID NO: 5554 - protein, 8 aa, synthetic construct
  REGION 1..8: note = briakinumab heavy chain CDR1
GFTFSSYG

SEQ ID NO: 5555 - protein, 8 aa, synthetic construct
  REGION 1..8: note = briakinumab heavy chain CDR2
IRYDGSNK

SEQ ID NO: 5556 - protein, 8 aa, synthetic construct
  REGION 1..8: note = briakinumab heavy chain CDR3
KTHGSHDN

SEQ ID NO: 5557 - protein, 111 aa, synthetic construct [sequence omitted]

SEQ ID NO: 5558-5560 - skipped (3 entries)

SEQ ID NO: 5561 - protein, 116 aa, synthetic construct
  REGION 1..116: note = brodalumab heavy chain V region
QVQLVQSGAEVKKPGASVKVSCKASGYTFTRYGISWVRQAPGQGLEWMGWISTYSGNTNYAQKLQGRVTMTTDTSTSTAYMELRSLRSDDTAVYYCARRQLYFDYWGQGTLVTVSS

SEQ ID NO: 5562 - protein, 8 aa, synthetic construct
  REGION 1..8: note = brodalumab heavy chain CDR1
GYTFTRYG

SEQ ID NO: 5563 - protein, 8 aa, synthetic construct
  REGION 1..8: note = brodalumab heavy chain CDR2
ISTYSGNT

SEQ ID NO: 5564 - protein, 9 aa, synthetic construct
  REGION 1..9: note = brodalumab heavy chain CDR3
ARRQLYFDY

SEQ ID NO: 5565 - protein, 107 aa, synthetic construct
  REGION 1..107: note = brodalumab light chain V region
EIVMTQSPATLSVSPGERATLSCRASQSVSSNLAWFQQKPGQAPRPLIYDASTRATGVPARFSGSGSGTDFTLTISSLQSEDFAVYYCQQYDNWPLTFGGGTKVEIK

SEQ ID NO: 5566 - protein, 6 aa, synthetic construct
  REGION 1..6: note = brodalumab light chain CDR1
QSVSSN

SEQ ID NO: 5567 - skipped

SEQ ID NO: 5568 - protein, 9 aa, synthetic construct
  REGION 1..9: note = brodalumab light chain CDR3
QQYDNWPLT

SEQ ID NO: 5569 - protein, 120 aa, synthetic construct
  REGION 1..120: note = brolucizumab heavy chain V region
EVQLVESGGGLVQPGGSLRLSCTASGFSLTDYYYMTWVRQAPGKGLEWVGFIDPDDDPYYATWAKGRFTISRDNSKNTLYLQMNSLRAEDTAVYYCAGGDHNSGWGLDIWGQGTLVTVSS

SEQ ID NO: 5570 - protein, 9 aa, synthetic construct
  REGION 1..9: note = brolucizumab heavy chain CDR1
GFSLTDYYY

SEQ ID NO: 5571 - protein, 7 aa, synthetic construct
  REGION 1..7: note = brolucizumab heavy chain CDR2
IDPDDDP

SEQ ID NO: 5572 - protein, 13 aa, synthetic construct
  REGION 1..13: note = brolucizumab heavy chain CDR3
AGGDHNSGWGLDI

SEQ ID NO: 5573 - protein, 110 aa, synthetic construct
  REGION 1..110: note = brolucizumab light chain V region
EIVMTQSPSTLSASVGDRVIITCQASEIIHSWLAWYQQKPGKAPKLLIYLASTLASGVPSRFSGSGSGAEFTLTISSLQPDDFATYYCQNVYLASTNGANFGQGTKLTVL

SEQ ID NO: 5574 - protein, 6 aa, synthetic construct
  REGION 1..6: note = brolucizumab light chain CDR1
EIIHSW

SEQ ID NO: 5575 - skipped

SEQ ID NO: 5576 - protein, 12 aa, synthetic construct
  REGION 1..12: note = brolucizumab light chain CDR3
QNVYLASTNGAN

SEQ ID NO: 5577 - protein, 117 aa, synthetic construct
  REGION 1..117: note = burosumab heavy chain V region
QVQLVQSGAEVKKPGASVKVSCKASGYTFTNHYMHWVRQAPGQGLEWMGIINPISGSTSNAQKFQGRVTMTRDTSTSTVYMELSSLRSEDTAVYYCARDIVDAFDFWGQGTMVTVSS

SEQ ID NO: 5578 - protein, 8 aa, synthetic construct
  REGION 1..8: note = burosumab heavy chain CDR1
GYTFTNHY

SEQ ID NO: 5579 - protein, 8 aa, synthetic construct
  REGION 1..8: note = burosumab heavy chain CDR2
INPISGST

SEQ ID NO: 5580 - protein, 10 aa, synthetic construct
  REGION 1..10: note = burosumab heavy chain CDR3
ARDIVDAFDF

SEQ ID NO: 5581 - protein, 106 aa, synthetic construct
  REGION 1..106: note = burosumab light chain V region
AIQLTQSPSSLSASVGDRVTITCRASQGISSALVWYQQKPGKAPKLLIYDASSLESGVPSRFSGSGSGTDFTLTISSLQPEDFATYYCQQFNDYFTFGPGTKVDIK

SEQ ID NO: 5582 - protein, 6 aa, synthetic construct
  REGION 1..6: note = burosumab light chain CDR1
QGISSA

SEQ ID NO: 5583 - skipped

SEQ ID NO: 5584 - protein, 9 aa, synthetic construct
  REGION 1..9: note = burosumab light chain CDR3
QQFNDYFTF

SEQ ID NO: 5585 - protein, 115 aa, synthetic construct
  REGION 1..115: note = camidanlumab heavy chain V region
QVQLVQSGAEVKKPGSSVKVSCKASGGTFSRYIINWVRQAPGQGLEWMGRIIPILGVENYAQKFQGRVTITADKSTSTAYMELSSLRSEDTAVYYCARKDWFDYWGQGTLVTVSS

SEQ ID NO: 5586 - protein, 8 aa, synthetic construct
  REGION 1..8: note = camidanlumab heavy chain CDR1
GGTFSRYI

SEQ ID NO: 5587 - protein, 8 aa, synthetic construct
  REGION 1..8: note = camidanlumab heavy chain CDR2
IIPILGVE

SEQ ID NO: 5588 - protein, 8 aa, synthetic construct
  REGION 1..8: note = camidanlumab heavy chain CDR3
ARKDWFDY

SEQ ID NO: 5589 - protein, 107 aa, synthetic construct
  REGION 1..107: note = camidanlumab light chain V region
EIVLTQSPGTLSLSPGERATLSCRASQSVSSYLAWYQQKPGQAPRLLIYGASSRATGIPDRFSGSGSGTDFTLTISRLEPEDFAVYYCQQYGSSPLTFGGGTKVEIK

SEQ ID NO: 5590 - protein, 6 aa, synthetic construct
  REGION 1..6: note = camidanlumab light chain CDR1
QSVSSY

SEQ ID NO: 5591 - skipped

SEQ ID NO: 5592 - protein, 9 aa, synthetic construct
  REGION 1..9: note = camidanlumab light chain CDR3
QQYGSSPLT

SEQ ID NO: 5593 - protein, 115 aa, synthetic construct; identical to SEQ ID NO: 5585
  REGION 1..115: note = camidanlumab tesirine heavy chain V region

SEQ ID NO: 5594 - protein, 8 aa, synthetic construct
  REGION 1..8: note = camidanlumab tesirine heavy chain CDR1
GGTFSRYI

SEQ ID NO: 5595 - protein, 8 aa, synthetic construct
  REGION 1..8: note = camidanlumab tesirine heavy chain CDR2
IIPILGVE

SEQ ID NO: 5596 - protein, 8 aa, synthetic construct
  REGION 1..8: note = camidanlumab tesirine heavy chain CDR3
ARKDWFDY

SEQ ID NO: 5597 - protein, 107 aa, synthetic construct; identical to SEQ ID NO: 5589
  REGION 1..107: note = camidanlumab tesirine light chain V region

SEQ ID NO: 5598 - protein, 6 aa, synthetic construct
  REGION 1..6: note = camidanlumab tesirine light chain CDR1
QSVSSY

SEQ ID NO: 5599 - skipped

SEQ ID NO: 5600 - protein, 9 aa, synthetic construct
  REGION 1..9: note = camidanlumab tesirine light chain CDR3
QQYGSSPLT

SEQ ID NO: 5601 - protein, 118 aa, synthetic construct [sequence omitted]

SEQ ID NO: 5602 - protein, 8 aa, synthetic construct
  REGION 1..8: note = canakinumab heavy chain CDR1
GFTFSVYG

SEQ ID NO: 5603 - protein, 8 aa, synthetic construct
  REGION 1..8: note = canakinumab heavy chain CDR2
IWYDGDNQ

SEQ ID NO: 5604 - protein, 11 aa, synthetic construct
  REGION 1..11: note = canakinumab heavy chain CDR3
ARDLRTGPFDY

SEQ ID NO: 5605 - protein, 107 aa, synthetic construct [sequence omitted]

SEQ ID NO: 5606 - protein, 6 aa, synthetic construct
  REGION 1..6: note = canakinumab light chain CDR1
QSIGSS

SEQ ID NO: 5607 - skipped

SEQ ID NO: 5608 - protein, 9 aa, synthetic construct
  REGION 1..9: note = canakinumab light chain CDR3
HQSSSLPFT

SEQ ID NO: 5609 - protein, 128 aa, synthetic construct
  REGION 1..128: note = caplacizumab heavy chain D1 V region
EVQLVESGGGLVQPGGSLRLSCAASGRTFSYNPMGWFRQAPGKGRELVAAISRTGGSTYYPDSVEGRFTISRDNAKRMVYLQMNSLRAEDTAVYYCAAAGVRAEDGRVRTLPSEYTFWGQGTQVTVSS

SEQ ID NO: 5610 - protein, 8 aa, synthetic construct
  REGION 1..8: note = caplacizumab heavy chain D1 CDR1
GRTFSYNP

SEQ ID NO: 5611 - protein, 8 aa, synthetic construct
  REGION 1..8: note = caplacizumab heavy chain D1 CDR2
ISRTGGST

SEQ ID NO: 5612 - protein, 21 aa, synthetic construct
  REGION 1..21: note = caplacizumab heavy chain D1 CDR3
AAAGVRAEDGRVRTLPSEYTF

SEQ ID NO: 5613 - protein, 128 aa, synthetic construct; identical to SEQ ID NO: 5609
  REGION 1..128: note = caplacizumab heavy chain D3 V region

SEQ ID NO: 5614 - protein, 7 aa, synthetic construct
  REGION 1..7: note = caplacizumab heavy chain D3 CDR1
GRTFSYN

SEQ ID NO: 5615 - protein, 8 aa, synthetic construct
  REGION 1..8: note = caplacizumab heavy chain D3 CDR2
ISRTGGST

SEQ ID NO: 5616 - protein, 21 aa, synthetic construct
  REGION 1..21: note = caplacizumab heavy chain D3 CDR3
AAAGVRAEDGRVRTLPSEYTF

SEQ ID NO: 5617 - protein, 119 aa, synthetic construct
  REGION 1..119: note = carlumab heavy chain V region
QVQLVQSGAEVKKPGSSVKVSCKASGGTFSSYGISWVRQAPGQGLEWMGGIIPIFGTANYAQKFQGRVTITADESTSTAYMELSSLRSEDTAVYYCARYDGIYGELDFWGQGTLVTVSS

SEQ ID NO: 5618 - protein, 7 aa, synthetic construct
  REGION 1..7: note = carlumab heavy chain CDR1
GTFSSYG

SEQ ID NO: 5619 - protein, 8 aa, synthetic construct
  REGION 1..8: note = carlumab heavy chain CDR2
IIPIFGTA

SEQ ID NO: 5620 - protein, 12 aa, synthetic construct
  REGION 1..12: note = carlumab heavy chain CDR3
ARYDGIYGELDF

SEQ ID NO: 5621 - protein, 109 aa, synthetic construct
  REGION 1..109: note = carlumab light chain V region
EIVLTQSPATLSLSPGERATLSCRASQSVSDAYLAWYQQKPGQAPRLLIYDASSRATGVPARFSGSGSGTDFTLTISSLEPEDFAVYYCHQYIQLHSFTFGQGTKVEIK

SEQ ID NO: 5622 - protein, 7 aa, synthetic construct
  REGION 1..7: note = carlumab light chain CDR1
QSVSDAY

SEQ ID NO: 5623 - skipped

SEQ ID NO: 5624 - protein, 10 aa, synthetic construct
  REGION 1..10: note = carlumab light chain CDR3
HQYIQLHSFT

SEQ ID NO: 5625 - protein, 120 aa, synthetic construct; identical to SEQ ID NO: 428
  REGION 1..120: note = casirivimab heavy chain V region

SEQ ID NO: 5626 - protein, 8 aa, synthetic construct
  REGION 1..8: note = casirivimab heavy chain CDR1
GFTFSDYY

SEQ ID NO: 5627 - protein, 8 aa, synthetic construct
  REGION 1..8: note = casirivimab heavy chain CDR2
ITYSGSTI

SEQ ID NO: 5628 - protein, 13 aa, synthetic construct
  REGION 1..13: note = casirivimab heavy chain CDR3
ARDRGTTMVPFDY

SEQ ID NO: 5629 - protein, 107 aa, synthetic construct; identical to SEQ ID NO: 427
  REGION 1..107: note = casirivimab light chain V region

SEQ ID NO: 5630 - protein, 6 aa, synthetic construct
  REGION 1..6: note = casirivimab light chain CDR1
QDITNY

SEQ ID NO: 5631 - skipped

SEQ ID NO: 5632 - protein, 9 aa, synthetic construct
  REGION 1..9: note = casirivimab light chain CDR3
QQYDNLPLT

SEQ ID NO: 5633 - protein, 117 aa, synthetic construct [sequence omitted]

SEQ ID NO: 5634 - protein, 8 aa, synthetic construct
  REGION 1..8: note = cemiplimab heavy chain CDR1
GFTFSNFG

SEQ ID NO: 5635 - protein, 8 aa, synthetic construct
  REGION 1..8: note = cemiplimab heavy chain CDR2
ISGGGRDT

SEQ ID NO: 5636 - protein, 10 aa, synthetic construct
  REGION 1..10: note = cemiplimab heavy chain CDR3
VKWGNIYFDY

SEQ ID NO: 5637 - protein, 107 aa, synthetic construct [sequence omitted]

SEQ ID NO: 5638 - protein, 6 aa, synthetic construct
  REGION 1..6: note = cemiplimab light chain CDR1
LSINTF

SEQ ID NO: 5639 - skipped

SEQ ID NO: 5640 - protein, 9 aa, synthetic construct
  REGION 1..9: note = cemiplimab light chain CDR3
QQSSNTPFT

SEQ ID NO: 5641 - protein, 121 aa, synthetic construct
  REGION 1..121: note = cergutuzumab heavy chain V region
QVQLVQSGAEVKKPGASVKVSCKASGYTFTEFGMNWVRQAPGQGLEWMGWINTKTGEATYVEEFKGRVTFTTDTSTSTAYMELRSLRSDDTAVYYCARWDFAYYVEAMDYWGQGTTVTVSS

SEQ ID NO: 5642 - protein, 8 aa, synthetic construct
  REGION 1..8: note = cergutuzumab heavy chain CDR1
GYTFTEFG

SEQ ID NO: 5643 - protein, 8 aa, synthetic construct
  REGION 1..8: note = cergutuzumab heavy chain CDR2
INTKTGEA

SEQ ID NO: 5644 - protein, 14 aa, synthetic construct
  REGION 1..14: note = cergutuzumab heavy chain CDR3
ARWDFAYYVEAMDY

SEQ ID NO: 5645 - protein, 108 aa, synthetic construct
  REGION 1..108: note = cergutuzumab light chain V region
DIQMTQSPSSLSASVGDRVTITCKASAAVGTYVAWYQQKPGKAPKLLIYSASYRKRGVPSRFSGSGSGTDFTLTISSLQPEDFATYYCHQYYTYPLFTFGQGTKLEIK

SEQ ID NO: 5646 - protein, 6 aa, synthetic construct
  REGION 1..6: note = cergutuzumab light chain CDR1
AAVGTY

SEQ ID NO: 5647 - skipped

SEQ ID NO: 5648 - protein, 11 aa, synthetic construct
  REGION 1..11: note = cergutuzumab light chain CDR3
HQYYTYPLFTF

SEQ ID NO: 5649 - protein, 119 aa, synthetic construct
  REGION 1..119: note = certuximab heavy chain V region
QVQLKQSGPGLVQPSQSLSITCTVSGFSLTNYGVHWVRQSPGKGLEWLGVIWSGGNTDYNTPFTSRLSINKDNSKSQVFFKMNSLQSNDTAIYYCARALTYYDYEFAYWGQGTLVTVSA

SEQ ID NO: 5650 - protein, 8 aa, synthetic construct
  REGION 1..8: note = certuximab heavy chain CDR1
GFSLTNYG

SEQ ID NO: 5651 - protein, 7 aa, synthetic construct
  REGION 1..7: note = certuximab heavy chain CDR2
IWSGGNT

SEQ ID NO: 5652 - protein, 13 aa, synthetic construct
  REGION 1..13: note = certuximab heavy chain CDR3
ARALTYYDYEFAY

SEQ ID NO: 5653 - protein, 107 aa, synthetic construct
  REGION 1..107: note = certuximab light chain V region
DILLTQSPVILSVSPGERVSFSCRASQSIGTNIHWYQQRTNGSPRLLIKYASESISGIPSRFSGSGSGTDFTLSINSVESEDIADYYCQQNNNWPTTFGAGTKLELK

SEQ ID NO: 5654 - protein, 6 aa, synthetic construct
  REGION 1..6: note = certuximab light chain CDR1
QSIGTN

SEQ ID NO: 5655 - skipped

SEQ ID NO: 5656 - protein, 9 aa, synthetic construct
  REGION 1..9: note = certuximab light chain CDR3
QQNNNWPTT

SEQ ID NO: 5657 - protein, 123 aa, synthetic construct
  REGION 1..123: note = cetrelimab heavy chain V region
QVQLVQSGAEVKKPGSSVKVSCKASGGTFSSYAISWVRQAPGQGLEWMGGIIPIFDTANYAQKFQGRVTITADESTSTAYMELSSLRSEDTAVYYCARPGLAAAYDTGSLDYWGQGTLVTVSS

SEQ ID NO: 5658 - protein, 8 aa, synthetic construct
  REGION 1..8: note = cetrelimab heavy chain CDR1
GGTFSSYA

SEQ ID NO: 5659 - protein, 8 aa, synthetic construct
  REGION 1..8: note = cetrelimab heavy chain CDR2
IIPIFDTA

SEQ ID NO: 5660 - protein, 16 aa, synthetic construct
  REGION 1..16: note = cetrelimab heavy chain CDR3
ARPGLAAAYDTGSLDY

SEQ ID NO: 5661 - protein, 107 aa, synthetic construct
  REGION 1..107: note = cetrelimab light chain V region
EIVLTQSPATLSLSPGERATLSCRASQSVRSYLAWYQQKPGQAPRLLIYDASNRATGIPARFSGSGSGTDFTLTISSLEPEDFAVYYCQQRNYWPLTFGQGTKVEIK

SEQ ID NO: 5662 - protein, 6 aa, synthetic construct
  REGION 1..6: note = cetrelimab light chain CDR1
QSVRSY

SEQ ID NO: 5663 - skipped

SEQ ID NO: 5664 - protein, 9 aa, synthetic construct
  REGION 1..9: note = cetrelimab light chain CDR3
QQRNYWPLT

SEQ ID NO: 5665 - protein, 131 aa, synthetic construct; identical to SEQ ID NO: 448
  REGION 1..131: note = cilgavimab heavy chain V region

SEQ ID NO: 5666 - protein, 8 aa, synthetic construct
  REGION 1..8: note = cilgavimab heavy chain CDR1
GFTFRDVW

SEQ ID NO: 5667 - protein, 10 aa, synthetic construct
  REGION 1..10: note = cilgavimab heavy chain CDR2
IKSKIDGGTT

SEQ ID NO: 5668 - protein, 22 aa, synthetic construct
  REGION 1..22: note = cilgavimab heavy chain CDR3
TTAGSYYYDTVGPGLPEGKFDY

SEQ ID NO: 5669 - protein, 112 aa, synthetic construct; identical to SEQ ID NO: 447
  REGION 1..112: note = cilgavimab light chain V region

SEQ ID NO: 5670 - protein, 12 aa, synthetic construct
  REGION 1..12: note = cilgavimab light chain CDR1
QSVLYSSNNKNY

SEQ ID NO: 5671 - skipped

SEQ ID NO: 5672 - protein, 8 aa, synthetic construct
  REGION 1..8: note = cilgavimab light chain CDR3
QQYYSTLT

SEQ ID NO: 5673 - protein, 130 aa, synthetic construct
  REGION 1..130: note = cixutumumab heavy chain V region
EVQLVQSGAEVKKPGSSVKVSCKASGGTFSSYAISWVRQAPGQGLEWMGGIIPIFGTANYAQKFQGRVTITADKSTSTAYMELSSLRSEDTAVYYCARAPLRFLEWSTQDHYYYYYMDVWGKGTTVTVSS

SEQ ID NO: 5674 - protein, 8 aa, synthetic construct
  REGION 1..8: note = cixutumumab heavy chain CDR1
GGTFSSYA

SEQ ID NO: 5675 - protein, 8 aa, synthetic construct
  REGION 1..8: note = cixutumumab heavy chain CDR2
IIPIFGTA

SEQ ID NO: 5676 - protein, 23 aa, synthetic construct
  REGION 1..23: note = cixutumumab heavy chain CDR3
ARAPLRFLEWSTQDHYYYYYMDV

SEQ ID NO: 5677 - protein, 108 aa, synthetic construct
  REGION 1..108: note = cixutumumab light chain V region
SSELTQDPAVSVALGQTVRITCQGDSLRSYYATWYQQKPGQAPILVIYGENKRPSGIPDRFSGSSSGNTASLTITGAQAEDEADYYCKSRDGSGQHLVFGGGTKLTVL

SEQ ID NO: 5678 - protein, 6 aa, synthetic construct
  REGION 1..6: note = cixutumumab light chain CDR1
SLRSYY

SEQ ID NO: 5679 - skipped

SEQ ID NO: 5680 - protein, 11 aa, synthetic construct
  REGION 1..11: note = cixutumumab light chain CDR3
KSRDGSGQHLV

SEQ ID NO: 5681 - protein, 122 aa, synthetic construct
  REGION 1..122: note = conatumumab heavy chain V region
QVQLQESGPGLVKPSQTLSLTCTVSGGSISSGDYFWSWIRQLPGKGLEWIGHIHNSGTTYYNPSLKSRVTISVDTSKKQFSLRLSSVTAADTAVYYCARDRGGDYYYGMDVWGQGTTVTVSS

SEQ ID NO: 5682 - protein, 10 aa, synthetic construct
  REGION 1..10: note = conatumumab heavy chain CDR1
GGSISSGDYF

SEQ ID NO: 5683 - protein, 7 aa, synthetic construct
  REGION 1..7: note = conatumumab heavy chain CDR2
IHNSGTT

SEQ ID NO: 5684 - protein, 14 aa, synthetic construct
  REGION 1..14: note = conatumumab heavy chain CDR3
ARDRGGDYYYGMDV

SEQ ID NO: 5685 - protein, 108 aa, synthetic construct
  REGION 1..108: note = conatumumab light chain V region
EIVLTQSPGTLSLSPGERATLSCRASQGISRSYLAWYQQKPGQAPSLLIYGASSRATGIPDRFSGSGSGTDFTLTISRLEPEDFAVYYCQQFGSSPWTFGQGTKVEIK

SEQ ID NO: 5686 - protein, 7 aa, synthetic construct
  REGION 1..7: note = conatumumab light chain CDR1
QGISRSY

SEQ ID NO: 5687 - skipped

SEQ ID NO: 5688 - protein, 8 aa, synthetic construct
  REGION 1..8: note = conatumumab light chain CDR3
QQFGSSPW

SEQ ID NO: 5689 - protein, 120 aa, synthetic construct
  REGION 1..120: note = cosibelimab heavy chain V region
EVQLVQSGAEVKKPGSSVKVSCKASGGTFSRSAISWVRQAPGQGLEWMGVIIPAFGEANYAQKFQGRVTITADESTSTAYMELSSLRSEDTAVYYCARGRQMFGAGIDFWGQGTLVTVSS

SEQ ID NO: 5690 - protein, 8 aa, synthetic construct
  REGION 1..8: note = cosibelimab heavy chain CDR1
GGTFSRSA

SEQ ID NO: 5691 - protein, 8 aa, synthetic construct
  REGION 1..8: note = cosibelimab heavy chain CDR2
IIPAFGEA

SEQ ID NO: 5692 - protein, 13 aa, synthetic construct
  REGION 1..13: note = cosibelimab heavy chain CDR3
ARGRQMFGAGIDF

SEQ ID NO: 5693 - protein, 112 aa, synthetic construct
  REGION 1..112: note = cosibelimab light chain V region
NFMLTQPHSVSESPGKTVTISCTRSSGSIDSNYVQWYQQRPGSAPTTVIYEDNQRPSGVPDRFSGSIDSSSNSASLTISGLKTEDEADYYCQSYDSNNRHVIFGGGTKLTVL

SEQ ID NO: 5694 - protein, 8 aa, synthetic construct
  REGION 1..8: note = cosibelimab light chain CDR1
SGSIDSNY

SEQ ID NO: 5695 - skipped

SEQ ID NO: 5696 - protein, 11 aa, synthetic construct
  REGION 1..11: note = cosibelimab light chain CDR3
QSYDSNNRHVI

SEQ ID NO: 5697 - protein, 122 aa, synthetic construct
  REGION 1..122: note = crizanlizumab heavy chain V region
QVQLVQSGAEVKKPGASVKVSCKVSGYTFTSYDINWVRQAPGKGLEWMGWIYPGDGSIKYNEKFKGRVTMTVDKSTDTAYMELSSLRSEDTAVYYCARRGEYGNYEGAMDYWGQGTLVTVSS

SEQ ID NO: 5698 - protein, 8 aa, synthetic construct
  REGION 1..8: note = crizanlizumab heavy chain CDR1
GYTFTSYD

SEQ ID NO: 5699 - protein, 8 aa, synthetic construct
  REGION 1..8: note = crizanlizumab heavy chain CDR2
IYPGDGSI

SEQ ID NO: 5700 - protein, 15 aa, synthetic construct
  REGION 1..15: note = crizanlizumab heavy chain CDR3
ARRGEYGNYEGAMDY

SEQ ID NO: 5701 - protein, 111 aa, synthetic construct
  REGION 1..111: note = crizanlizumab light chain V region
DIQMTQSPSSLSASVGDRVTITCKASQSVDYDGHSYMNWYQQKPGKAPKLLIYAASNLESGVPSRFSGSGSGTDFTLTISSLQPEDFATYYCQQSDENPLTFGGGTKVEIK

SEQ ID NO: 5702 - protein, 10 aa, synthetic construct
  REGION 1..10: note = crizanlizumab light chain CDR1
QSVDYDGHSY

SEQ ID NO: 5703 - skipped

SEQ ID NO: 5704 - protein, 9 aa, synthetic construct
  REGION 1..9: note = crizanlizumab light chain CDR3
QQSDENPLT

SEQ ID NO: 5705 - protein, 128 aa, synthetic construct
  REGION 1..128: note = crotedumab heavy chain V region
EVQLVESGGGLVQPGGSLRLSCAASGFTFSNYLMNWVRQAPGKGLEWLANIQEDGIEKYYVDSVKGRFTISRDNAKNSLYLQMNSLRAEDTAVYYCAREPSHYDILTGYDYYYGMDVWGQGTTVTVSS

SEQ ID NO: 5706 - protein, 8 aa, synthetic construct
  REGION 1..8: note = crotedumab heavy chain CDR1
GFTFSNYL

SEQ ID NO: 5707 - protein, 8 aa, synthetic construct
  REGION 1..8: note = crotedumab heavy chain CDR2
IQEDGIEK

SEQ ID NO: 5708 - protein, 21 aa, synthetic construct
  REGION 1..21: note = crotedumab heavy chain CDR3
AREPSHYDILTGYDYYYGMDV

SEQ ID NO: 5709 - protein, 107 aa, synthetic construct
  REGION 1..107: note = crotedumab light chain V region
DIQMTQSPSSLSASVGDRVTITCRASQGIRNDLGWYQQKPGKAPKRLIYAASSLQSGVPSRFSGSGSGTEFILTVSSLQPEDFATYYCLQYNSNPFTFGPGTKVDIK

SEQ ID NO: 5710 - protein, 6 aa, synthetic construct
  REGION 1..6: note = crotedumab light chain CDR1
QGIRND

SEQ ID NO: 5711 - skipped

SEQ ID NO: 5712 - protein, 10 aa, synthetic construct
  REGION 1..10: note = crotedumab light chain CDR3
LQYNSNPFTF

SEQ ID NO: 5713 - protein, 124 aa, synthetic construct
  REGION 1..124: note = cudarolimab heavy chain V region
QVQLVESGGGVVQPGRSLRLSCAASGFTFSSYGMHWVRQAPGKGLEWVAVISYDGSNKYYADSVKGRFTISRDNSKNTLYLQMNSLRAEDTAVYYCARGRPWYSETGTSAFDIWGQGTMVTVSS

SEQ ID NO: 5714 - protein, 8 aa, synthetic construct
  REGION 1..8: note = cudarolimab heavy chain CDR1
GFTFSSYG

SEQ ID NO: 5715 - protein, 8 aa, synthetic construct
  REGION 1..8: note = cudarolimab heavy chain CDR2
ISYDGSNK

SEQ ID NO: 5716 - protein, 17 aa, synthetic construct
  REGION 1..17: note = cudarolimab heavy chain CDR3
ARGRPWYSETGTSAFDI

SEQ ID NO: 5717 - protein, 106 aa, synthetic construct
  REGION 1..106: note = cudarolimab light chain V region
DIQMTQSPSSLSASVGDRVTITCQASQDISNYLNWYQQKPGKAPKLLIYDASNLETGVPSRFSGSGSGTDFTFTISSLQPEDIATYYCQQSDHYPTFGGGTKVEIK

SEQ ID NO: 5718 - protein, 6 aa, synthetic construct
  REGION 1..6: note = cudarolimab light chain CDR1
QDISNY

SEQ ID NO: 5719 - skipped

SEQ ID NO: 5720 - protein, 8 aa, synthetic construct
  REGION 1..8: note = cudarolimab light chain CDR3
QQSDHYPT

SEQ ID NO: 5721 - protein, 116 aa, synthetic construct
  REGION 1..116: note = daclizumab heavy chain V region
QVQLVQSGAEVKKPGSSVKVSCKASGYTFTSYRMHWVRQAPGQGLEWIGYINPSTGYTEYNQKFKDKATITADESTNTAYMELSSLRSEDTAVYYCARGGGVFDYWGQGTLVTVSS

SEQ ID NO: 5722 - protein, 8 aa, synthetic construct
  REGION 1..8: note = daclizumab heavy chain CDR1
GYTFTSYR

SEQ ID NO: 5723 - protein, 8 aa, synthetic construct
  REGION 1..8: note = daclizumab heavy chain CDR2
INPSTGYT

SEQ ID NO: 5724 - protein, 9 aa, synthetic construct
  REGION 1..9: note = daclizumab heavy chain CDR3
ARGGGVFDY

SEQ ID NO: 5725 - protein, 106 aa, synthetic construct
  REGION 1..106: note = daclizumab light chain V region
DIQMTQSPSTLSASVGDRVTITCSASSSISYMHWYQQKPGKAPKLLIYTTSNLASGVPARFSGSGSGTEFTLTISSLQPDDFATYYCHQRSTYPLTFGQGTKVEVK

SEQ ID NO: 5726 - protein, 4 aa, synthetic construct
  REGION 1..4: note = daclizumab light chain CDR1
SSIS

SEQ ID NO: 5727 - skipped

SEQ ID NO: 5728 - protein, 9 aa, synthetic construct
  REGION 1..9: note = daclizumab light chain CDR3
HQRSTYPLT

SEQ ID NO: 5729 - protein, 130 aa, synthetic construct
  REGION 1..130: note = dalutrafusp alfa heavy chain V region
QVQLVQSGAEVKKPGSSVKVSCKASGGIFRTYAISWVRQAPGQGLEWMGGIIPMFGTVNYAQKFQGRVTISADKSTSTAYMELSRLRSEDTAVYYCARPPSGGCGGDCSRRGYYYAMDVWGQGTTITVSS

SEQ ID NO: 5730 - protein, 8 aa, synthetic construct
  REGION 1..8: note = dalutrafusp alfa heavy chain CDR1
GGIFRTYA

SEQ ID NO: 5731 - protein, 8 aa, synthetic construct
  REGION 1..8: note = dalutrafusp alfa heavy chain CDR2
IIPMFGTV

SEQ ID NO: 5732 - protein, 23 aa, synthetic construct
  REGION 1..23: note = dalutrafusp alfa heavy chain CDR3
ARPPSGGCGGDCSRRGYYYAMDV

SEQ ID NO: 5733 - protein, 110 aa, synthetic construct
  REGION 1..110: note = dalutrafusp alfa light chain V region
QSALTQPASVSGSPGQSITISCSGSSSDVGGYKYVSWYQQHPGKAPQLMIYDVNNRPSGVSNRFSGSKSGNTASLTISGLQAEDEADYYCSSYTSSSTRVFGGGTKLTVL

SEQ ID NO: 5734 - protein, 9 aa, synthetic construct
  REGION 1..9: note = dalutrafusp alfa light chain CDR1
SSDVGGYKY

SEQ ID NO: 5735 - skipped

SEQ ID NO: 5736 - protein, 10 aa, synthetic construct
  REGION 1..10: note = dalutrafusp alfa light chain CDR3
SSYTSSSTRV

SEQ ID NO: 5737 - protein, 122 aa, synthetic construct [sequence omitted]

SEQ ID NO: 5738 - protein, 8 aa, synthetic construct
  REGION 1..8: note = daratumumab heavy chain CDR1
GFTFNSFA

SEQ ID NO: 5739 - protein, 8 aa, synthetic construct
  REGION 1..8: note = daratumumab heavy chain CDR2
ISGSGGGT

SEQ ID NO: 5740 - protein, 15 aa, synthetic construct
  REGION 1..15: note = daratumumab heavy chain CDR3
AKDKILWFGEPVFDY

SEQ ID NO: 5741 - protein, 107 aa, synthetic construct [sequence omitted]

SEQ ID NO: 5742 - protein, 6 aa, synthetic construct
  REGION 1..6: note = daratumumab light chain CDR1
QSVSSY

SEQ ID NO: 5743 - skipped

SEQ ID NO: 5744 - protein, 10 aa, synthetic construct
  REGION 1..10: note = daratumumab light chain CDR3
QQRSNWPPTF

SEQ ID NO: 5745 - protein, 122 aa, synthetic construct
  REGION 1..122: note = daxdilimab heavy chain V region
QVQLQQSGAEVKKPGASVKVSCKASGYTFTSYGISWVRQAPGQGLEWMGWISAYNGNTNYAQKLQGRVTMTTDTSTSTAYMELRSLRSDDTAVYYCARNGLWGWDSDAFDIWGRGTLVTVSS

SEQ ID NO: 5746 - protein, 8 aa, synthetic construct
  REGION 1..8: note = daxdilimab heavy chain CDR1
GYTFTSYG

SEQ ID NO: 5747 - protein, 8 aa, synthetic construct
  REGION 1..8: note = daxdilimab heavy chain CDR2
ISAYNGNT

SEQ ID NO: 5748 - protein, 15 aa, synthetic construct
  REGION 1..15: note = daxdilimab heavy chain CDR3
ARNGLWGWDSDAFDI

SEQ ID NO: 5749 - protein, 110 aa, synthetic construct
  REGION 1..110: note = daxdilimab light chain V region
QSALTQPASVSGSPGQSITISCTGTSSDVGGYNYVSWYQQHPGKAPKLMIYDVSNRPSGVSNRFSGSKSGNTASLTISGLQAEDEADYYCSSYTSSSTVVFGGGTKVTVL

SEQ ID NO: 5750 - protein, 9 aa, synthetic construct
  REGION 1..9: note = daxdilimab light chain CDR1
SSDVGGYNY

SEQ ID NO: 5751 - skipped

SEQ ID NO: 5752 - protein, 10 aa, synthetic construct
  REGION 1..10: note = daxdilimab light chain CDR3
SSYTSSSTVV

SEQ ID NO: 5753 - protein, 120 aa, synthetic construct
  REGION 1..120: note = dectrekumab heavy chain V region
EVQLVESGGGVVQPGRSLRLSCAASGFTFSSYGMHWVRQAPGKGLEWVAIIWYDGSNKYYADSVKGRFTISRDNSKNTLYLQMNSLRAEDTAVYYCARLWFGDLDAFDIWGQGTMVTVSS

SEQ ID NO: 5754 - protein, 8 aa, synthetic construct
  REGION 1..8: note = dectrekumab heavy chain CDR1
GFTFSSYG

SEQ ID NO: 5755 - protein, 8 aa, synthetic construct
  REGION 1..8: note = dectrekumab heavy chain CDR2
IWYDGSNK

SEQ ID NO: 5756 - protein, 13 aa, synthetic construct
  REGION 1..13: note = dectrekumab heavy chain CDR3
ARLWFGDLDAFDI

SEQ ID NO: 5757 - protein, 109 aa, synthetic construct
  REGION 1..109: note = dectrekumab light chain V region
EIVLTQSPATLSLSPGERAILSCRAGQSVSSYLVWYQQKPGQAPRLLIYDASNRATGIPARFSGSGSGTDFTLTISSLEPEDFAVYYCQQRSSWPPVYTFGQGTKLEIK

SEQ ID NO: 5758 - protein, 6 aa, synthetic construct
  REGION 1..6: note = dectrekumab light chain CDR1
QSVSSY

SEQ ID NO: 5759 - skipped

SEQ ID NO: 5760 - protein, 11 aa, synthetic construct
  REGION 1..11: note = dectrekumab light chain CDR3
QQRSSWPPVYT

SEQ ID NO: 5761 - protein, 119 aa, synthetic construct [sequence omitted]

SEQ ID NO: 5762 - protein, 10 aa, synthetic construct
  REGION 1..10: note = demupitamab heavy chain CDR1
GGSVSSGDYY

SEQ ID NO: 5763 - protein, 7 aa, synthetic construct
  REGION 1..7: note = demupitamab heavy chain CDR2
IYYSGNT

SEQ ID NO: 5764 - protein, 11 aa, synthetic construct
  REGION 1..11: note = demupitamab heavy chain CDR3
VRDRVTGAFDI

SEQ ID NO: 5765 - protein, 107 aa, synthetic construct
  REGION 1..107: note = demupitamab light chain V region
DIQMTQSPSTLSASVGDRVTITCQASQDISNYLNWYQQKPGKAPKLLIYDASNLETGVPSRFSGSGSGTDFTFTISSLQPEDIATYFCQHFDHLPLAFGGGTKVEIK

SEQ ID NO: 5766 - protein, 6 aa, synthetic construct
  REGION 1..6: note = demupitamab light chain CDR1
QDISNY

SEQ ID NO: 5767 - skipped

SEQ ID NO: 5768 - protein, 9 aa, synthetic construct
  REGION 1..9: note = demupitamab light chain CDR3
QHFDHLPLA

SEQ ID NO: 5769 - protein, 122 aa, synthetic construct
  REGION 1..122: note = denosumab heavy chain V region
EVQLLESGGGLVQPGGSLRLSCAASGFTFSSYAMSWVRQAPGKGLEWVSGITGSGGSTYYADSVKGRFTISRDNSKNTLYLQMNSLRAEDTAVYYCAKDPGTTVIMSWFDPWGQGTLVTVSS

SEQ ID NO: 5770 - protein, 8 aa, synthetic construct
  REGION 1..8: note = denosumab heavy chain CDR1
GFTFSSYA

SEQ ID NO: 5771 - protein, 8 aa, synthetic construct
  REGION 1..8: note = denosumab heavy chain CDR2
ITGSGGST

SEQ ID NO: 5772 - protein, 15 aa, synthetic construct
  REGION 1..15: note = denosumab heavy chain CDR3
AKDPGTTVIMSWFDP

SEQ ID NO: 5773 - protein, 108 aa, synthetic construct
  REGION 1..108: note = denosumab light chain V region
EIVLTQSPGTLSLSPGERATLSCRASQSVRGRYLAWYQQKPGQAPRLLIYGASSRATGIPDRFSGSGSGTDFTLTISRLEPEDFAVFYCQQYGSSPRTFGQGTKVEIK

SEQ ID NO: 5774 - protein, 7 aa, synthetic construct
  REGION 1..7: note = denosumab light chain CDR1
QSVRGRY

SEQ ID NO: 5775 - skipped

SEQ ID NO: 5776 - protein, 9 aa, synthetic construct
  REGION 1..9: note = denosumab light chain CDR3
QQYGSSPRT

SEQ ID NO: 5777 - protein, 113 aa, synthetic construct [sequence omitted]

SEQ ID NO: 5778 - protein, 8 aa, synthetic construct
  REGION 1..8: note = dinutuximab heavy chain CDR1
GSSFTGYN

SEQ ID NO: 5779 - protein, 8 aa, synthetic construct
  REGION 1..8: note = dinutuximab heavy chain CDR2
IDPYYGGT

SEQ ID NO: 5780 - protein, 6 aa, synthetic construct
  REGION 1..6: note = dinutuximab heavy chain CDR3
VSGMEY

SEQ ID NO: 5781 - protein, 113 aa, synthetic construct [sequence omitted]

SEQ ID NO: 5782 - protein, 11 aa, synthetic construct
  REGION 1..11: note = dinutuximab light chain CDR1
QSLVHRNGNTY

SEQ ID NO: 5783 - skipped

SEQ ID NO: 5784 - protein, 10 aa, synthetic construct
  REGION 1..10: note = dinutuximab light chain CDR3
SQSTHVPPLT

SEQ ID NO: 5785 - protein, 121 aa, synthetic construct [sequence omitted]

SEQ ID NO: 5786 - protein, 8 aa, synthetic construct
  REGION 1..8: note = diridavumab heavy chain CDR1
GGPFRSYA

SEQ ID NO: 5787 - protein, 8 aa, synthetic construct
  REGION 1..8: note = diridavumab heavy chain CDR2
IIPIFGTT

SEQ ID NO: 5788 - protein, 14 aa, synthetic construct
  REGION 1..14: note = diridavumab heavy chain CDR3
AKHMGYQVRETMDV

SEQ ID NO: 5789 - protein, 111 aa, synthetic construct [sequence omitted]

SEQ ID NO: 5790 - protein, 8 aa, synthetic construct
  REGION 1..8: note = diridavumab light chain CDR1
SSNIGNDY

SEQ ID NO: 5791 - skipped

SEQ ID NO: 5792 - protein, 12 aa, synthetic construct
  REGION 1..12: note = diridavumab light chain CDR3
ATWDRRPTAYVV

SEQ ID NO: 5793 - protein, 116 aa, synthetic construct
  REGION 1..116: note = dostarlimab heavy chain V region
EVQLLESGGGLVQPGGSLRLSCAASGFTFSSYDMSWVRQAPGKGLEWVSTISGGGSYTYYQDSVKGRFTISRDNSKNTLYLQMNSLRAEDTAVYYCASPYYAMDYWGQGTTVTVSS

SEQ ID NO: 5794 - protein, 8 aa, synthetic construct
  REGION 1..8: note = dostarlimab heavy chain CDR1
GFTFSSYD

SEQ ID NO: 5795 - protein, 8 aa, synthetic construct
  REGION 1..8: note = dostarlimab heavy chain CDR2
ISGGGSYT

SEQ ID NO: 5796 - protein, 9 aa, synthetic construct
  REGION 1..9: note = dostarlimab heavy chain CDR3
ASPYYAMDY

SEQ ID NO: 5797 - protein, 107 aa, synthetic construct
  REGION 1..107: note = dostarlimab light chain V region
DIQLTQSPSFLSAYVGDRVTITCKASQDVGTAVAWYQQKPGKAPKLLIYWASTLHTGVPSRFSGSGSGTEFTLTISSLQPEDFATYYCQHYSSYPWTFGQGTKLEIK

SEQ ID NO: 5798 - protein, 6 aa, synthetic construct
  REGION 1..6: note = dostarlimab light chain CDR1
QDVGTA

SEQ ID NO: 5799 - skipped

SEQ ID NO: 5800 - protein, 9 aa, synthetic construct
  REGION 1..9: note = dostarlimab light chain CDR3
QHYSSYPWT

SEQ ID NO: 5801 - protein, 121 aa, synthetic construct [sequence omitted]

SEQ ID NO: 5802 - protein, 8 aa, synthetic construct
  REGION 1..8: note = drozitumab heavy chain CDR1
GFTFDDYA

SEQ ID NO: 5803 - protein, 8 aa, synthetic construct
  REGION 1..8: note = drozitumab heavy chain CDR2
INWQGGST

SEQ ID NO: 5804 - protein, 14 aa, synthetic construct
  REGION 1..14: note = drozitumab heavy chain CDR3
AKILGAGRGWYFDY

SEQ ID NO: 5805 - protein, 107 aa, synthetic construct [sequence omitted]

SEQ ID NO: 5806 - protein, 6 aa, synthetic construct
  REGION 1..6: note = drozitumab light chain CDR1
SLRSYY

SEQ ID NO: 5807 - skipped

SEQ ID NO: 5808 - protein, 11 aa, synthetic construct
  REGION 1..11: note = drozitumab light chain CDR3
NSADSSGNHVV

SEQ ID NO: 5809 - protein, 125 aa, synthetic construct [sequence omitted]

SEQ ID NO: 5810 - protein, 8 aa, synthetic construct
  REGION 1..8: note = dupilumab heavy chain CDR1
GFTFRDYA

SEQ ID NO: 5811 - protein, 8 aa, synthetic construct
  REGION 1..8: note = dupilumab heavy chain CDR2
ISGSGGNT

SEQ ID NO: 5812 - protein, 18 aa, synthetic construct
  REGION 1..18: note = dupilumab heavy chain CDR3
AKDRLSITIRPRYYGLDV

SEQ ID NO: 5813 - protein, 112 aa, synthetic construct [sequence omitted]

SEQ ID NO: 5814 - protein, 11 aa, synthetic construct
  REGION 1..11: note = dupilumab light chain CDR1
QSLLYSIGYNY

SEQ ID NO: 5815 - skipped

SEQ ID NO: 5816 - protein, 9 aa, synthetic construct
  REGION 1..9: note = dupilumab light chain CDR3
MQALQTPYT

SEQ ID NO: 5817 - protein, 121 aa, synthetic construct
  REGION 1..121: note = durvalumab heavy chain V region
EVQLVESGGGLVQPGGSLRLSCAASGFTFSRYWMSWVRQAPGKGLEWVANIKQDGSEKYYVDSVKGRFTISRDNAKNSLYLQMNSLRAEDTAVYYCAREGGWFGELAFDYWGQGTLVTVSS

SEQ ID NO: 5818 - protein, 11 aa, synthetic construct
  REGION 1..11: note = durvalumab heavy chain CDR1
GFTFSRYWMSW

SEQ ID NO: 5819 - protein, 8 aa, synthetic construct
  REGION 1..8: note = durvalumab heavy chain CDR2
IKQDGSEK

SEQ ID NO: 5820 - protein, 14 aa, synthetic construct
  REGION 1..14: note = durvalumab heavy chain CDR3
AREGGWFGELAFDY

SEQ ID NO: 5821 - protein, 108 aa, synthetic construct
  REGION 1..108: note = durvalumab light chain V region
EIVLTQSPGTLSLSPGERATLSCRASQRVSSSYLAWYQQKPGQAPRLLIYDASSRATGIPDRFSGSGSGTDFTLTISRLEPEDFAVYYCQQYGSLPWTFGQGTKVEIK

SEQ ID NO: 5822 - protein, 7 aa, synthetic construct
  REGION 1..7: note = durvalumab light chain CDR1
QRVSSSY

SEQ ID NO: 5823 - skipped

SEQ ID NO: 5824 - protein, 9 aa, synthetic construct
  REGION 1..9: note = durvalumab light chain CDR3
QQYGSLPWT

SEQ ID NO: 5825 - protein, 120 aa, synthetic construct
  REGION 1..120: note = dusigitumab heavy chain V region
QVQLVQSGAEVKKPGASVKVSCKASGYTFTSYDINWVRQATGQGLEWMGWMNPNSGNTGYAQKFQGRVTMTRNTSISTAYMELSSLRSEDTAVYYCARDPYYYYYGMDVWGQGTTVTVSS

SEQ ID NO: 5826 - protein, 8 aa, synthetic construct
  REGION 1..8: note = dusigitumab heavy chain CDR1
GYTFTSYD

SEQ ID NO: 5827 - protein, 8 aa, synthetic construct
  REGION 1..8: note = dusigitumab heavy chain CDR2
MNPNSGNT

SEQ ID NO: 5828 - protein, 12 aa, synthetic construct
  REGION 1..12: note = dusigitumab heavy chain CDR3
ARDPYYYYYGMD

SEQ ID NO: 5829 - protein, 111 aa, synthetic construct
  REGION 1..111: note = dusigitumab light chain V region
QSVLTQPPSVSAAPGQKVTISCSGSSSNIENNHVSWYQQLPGTAPKLLIYDNNKRPSGIPDRFSGSKSGTSATLGITGLQTGDEADYYCETWDTSLSAGRVFGGGTKLTVL

SEQ ID NO: 5830 - protein, 8 aa, synthetic construct
  REGION 1..8: note = dusigitumab light chain CDR1
SSNIENNH

SEQ ID NO: 5831 - skipped

SEQ ID NO: 5832 - protein, 12 aa, synthetic construct
  REGION 1..12: note = dusigitumab light chain CDR3
ETWDTSLSAGRV

SEQ ID NO: 5833 - protein, 118 aa, synthetic construct
  REGION 1..118: note = eblasakimab heavy chain V region
EVQLVQSGAEVKKPGESLKISCKGSGYSFTSYWIGWVRQMPGKGLEWMGVIYPGDSYTRYSPSFQGQVTISADKSISTAYLQWSSLKASDTAMYYCARMPNWGSLDHWGQGTLVTVSS

SEQ ID NO: 5834 - protein, 8 aa, synthetic construct
  REGION 1..8: note = eblasakimab heavy chain CDR1
GYSFTSYW

SEQ ID NO: 5835 - protein, 8 aa, synthetic construct
  REGION 1..8: note = eblasakimab heavy chain CDR2
IYPGDSYT

SEQ ID NO: 5836 - protein, 11 aa, synthetic construct
  REGION 1..11: note = eblasakimab heavy chain CDR3
ARMPNWGSLDH

SEQ ID NO: 5837 - protein, 104 aa, synthetic construct
  REGION 1..104: note = eblasakimab light chain V region
EIVLTQSPGTLSLSPGERATLSCRASQSISSSYLAWYQQKPGQAPRLLIYGASSRATGIPDRFSGSGSGTDFTLTISRLEPEDFAVYYCQQYASFGQGTKVEIK

SEQ ID NO: 5838 - protein, 7 aa, synthetic construct
  REGION 1..7: note = eblasakimab light chain CDR1
QSISSSY

SEQ ID NO: 5839 - skipped

SEQ ID NO: 5840 - protein, 5 aa, synthetic construct
  REGION 1..5: note = eblasakimab light chain CDR3
QQYAS

SEQ ID NO: 5841 - protein, 123 aa, synthetic construct
  REGION 1..123: note = ebronucimab heavy chain V region
EVQLVESGGGLVQPGRSLRLSCAASGFTFSSYSMNWVRQAPGKGLEWVSGISSSSSYISYADSVQGRFTISRDNGKNSLYLQMNSLRAEDTALYFCAREYDFWSAYYDAFDVWGQGTMVTVSS

SEQ ID NO: 5842 - protein, 8 aa, synthetic construct
  REGION 1..8: note = ebronucimab heavy chain CDR1
GFTFSSYS

SEQ ID NO: 5843 - protein, 9 aa, synthetic construct
  REGION 1..9: note = ebronucimab heavy chain CDR2
ISSSSSYIS

SEQ ID NO: 5844 - protein, 16 aa, synthetic construct
  REGION 1..16: note = ebronucimab heavy chain CDR3
AREYDFWSAYYDAFDV

SEQ ID NO: 5845 - protein, 111 aa, synthetic construct
  REGION 1..111: note = ebronucimab light chain V region
QSELTQPRSVSGSPGQSVTISCTGTSRNIGGGNDVHWYQQHPGKAPKLLISGVIERSSGVPDRFSGSKSGNTASLTISGLQAEDEADYYCQSFDGSLSGSVFGTGTDVTVL

SEQ ID NO: 5846 - protein, 9 aa, synthetic construct
  REGION 1..9: note = ebronucimab light chain CDR1
SRNIGGGND

SEQ ID NO: 5847 - skipped

SEQ ID NO: 5848 - protein, 11 aa, synthetic construct
  REGION 1..11: note = ebronucimab light chain CDR3
QSFDGSLSGSV

SEQ ID NO: 5849 - protein, 122 aa, synthetic construct [sequence omitted]

SEQ ID NO: 5850 - protein, 8 aa, synthetic construct
  REGION 1..8: note = eculizumab heavy chain CDR1
GYIFSNYW

SEQ ID NO: 5851 - protein, 8 aa, synthetic construct
  REGION 1..8: note = eculizumab heavy chain CDR2
ILPGSGST

SEQ ID NO: 5852 - protein, 15 aa, synthetic construct
  REGION 1..15: note = eculizumab heavy chain CDR3
ARYFFGSSPNWYFDV

SEQ ID NO: 5853 - protein, 107 aa, synthetic construct [sequence omitted]

SEQ ID NO: 5854 - protein, 6 aa, synthetic construct
  REGION 1..6: note = eculizumab light chain CDR1
ENIYGA

SEQ ID NO: 5855 - skipped

SEQ ID NO: 5856 - protein, 9 aa, synthetic construct
  REGION 1..9: note = eculizumab light chain CDR3
QNVLNTPLT

SEQ ID NO: 5857 - protein, 124 aa, synthetic construct
  REGION 1..124: note = eldelumab heavy chain V region
QMQLVESGGGVVQPGRSLRLSCTASGFTFSNNGMHWVRQAPGKGLEWVAVIWFDGMNKFYVDSVKGRFTISRDNSKNTLYLEMNSLRAEDTAIYYCAREGDGSGIYYYYGMDVWGQGTTVTVSS

SEQ ID NO: 5858 - protein, 8 aa, synthetic construct
  REGION 1..8: note = eldelumab heavy chain CDR1
GFTFSNNG

SEQ ID NO: 5859 - protein, 8 aa, synthetic construct
  REGION 1..8: note = eldelumab heavy chain CDR2
IWFDGMNK

SEQ ID NO: 5860 - protein, 17 aa, synthetic construct
  REGION 1..17: note = eldelumab heavy chain CDR3
AREGDGSGIYYYYGMDV

SEQ ID NO: 5861 - protein, 109 aa, synthetic construct
  REGION 1..109: note = eldelumab light chain V region
EIVLTQSPGTLSLSPGERATLSCRASQSVSSSYLAWYQQKPGQAPRLLIYGASSRATGIPDRFSGSGSGTDFTLTISRLEPEDFAVYYCQQYGSSPIFTFGPGTKVDIK

SEQ ID NO: 5862 - protein, 7 aa, synthetic construct
  REGION 1..7: note = eldelumab light chain CDR1
QSVSSSY

SEQ ID NO: 5863 - skipped

SEQ ID NO: 5864 - protein, 11 aa, synthetic construct
  REGION 1..11: note = eldelumab light chain CDR3
QQYGSSPIFTF

SEQ ID NO: 5865 - protein, 120 aa, synthetic construct
  REGION 1..120: note = elezanumab heavy chain V region
EVQLVQSGAEVKKPGASVKVSCKASGYTFTSHGISWVRQAPGQGLDWMGWISPYSGNTNYAQKLQGRVTMTTDTSTSTAYMELSSLRSEDTAVYYCARVGSGPYYYMDVWGQGTLVTVSS

SEQ ID NO: 5866 - protein, 8 aa, synthetic construct
  REGION 1..8: note = elezanumab heavy chain CDR1
GYTFTSHG

SEQ ID NO: 5867 - protein, 8 aa, synthetic construct
  REGION 1..8: note = elezanumab heavy chain CDR2
ISPYSGNT

SEQ ID NO: 5868 - protein, 13 aa, synthetic construct
  REGION 1..13: note = elezanumab heavy chain CDR3
ARVGSGPYYYMDV

SEQ ID NO: 5869 - protein, 109 aa, synthetic construct
  REGION 1..109: note = elezanumab light chain V region
QSALTQPRSVSGSPGQSVTISCTGTSSSVGDSIYVSWYQQHPGKAPKLMLYDVTKRPSGVPDRFSGSKSGNTASLTISGLQAEDEADYYCYSYAGTDTLFGGGTKVTVL

SEQ ID NO: 5870 - protein, 8 aa, synthetic construct
  REGION 1..8: note = elezanumab light chain CDR1
SSVGDSIY

SEQ ID NO: 5871 - skipped

SEQ ID NO: 5872 - protein, 9 aa, synthetic construct
  REGION 1..9: note = elezanumab light chain CDR3
YSYAGTDTL

SEQ ID NO: 5873 - protein, 117 aa, synthetic construct
  REGION 1..117: note = elgemtumab heavy chain V region
EVQLLESGGGLVQPGGSLRLSCAASGFTFSSYAMSWVRQAPGKGLEWVSAINSQGKSTYYADSVKGRFTISRDNSKNTLYLQMNSLRAEDTAVYYCARWGDEGFDIWGQGTLVTVSS

SEQ ID NO: 5874 - protein, 8 aa, synthetic construct
  REGION 1..8: note = elgemtumab heavy chain CDR1
GFTFSSYA

SEQ ID NO: 5875 - protein, 8 aa, synthetic construct
  REGION 1..8: note = elgemtumab heavy chain CDR2
INSQGKST

SEQ ID NO: 5876 - protein, 10 aa, synthetic construct
  REGION 1..10: note = elgemtumab heavy chain CDR3
ARWGDEGFDI

SEQ ID NO: 5877 - protein, 107 aa, synthetic construct
  REGION 1..107: note = elgemtumab light chain V region
DIQMTQSPSSLSASVGDRVTITCRASQGISNWLAWYQQKPGKAPKLLIYGASSLQSGVPSRFSGSGSGTDFTLTISSLQPEDFATYYCQQYSSFPTTFGQGTKVEIK

SEQ ID NO: 5878 - protein, 6 aa, synthetic construct
  REGION 1..6: note = elgemtumab light chain CDR1
QGISNW

SEQ ID NO: 5879 - skipped

SEQ ID NO: 5880 - protein, 9 aa, synthetic construct
  REGION 1..9: note = elgemtumab light chain CDR3
QQYSSFPTT

SEQ ID NO: 5881 - protein, 132 aa, synthetic construct
  REGION 1..132: note = elipovimab heavy chain V region
QMQLQESGPGLVKPSETLSLTCSVSGASISDSYWSWIRRSPGKGLEWIGYVHKSGDTNYNPSLKSRVHLSLDTSKNQVSLSLTGVTAADSGKYYCARTLHGRRIYGIVAFNEWFTYFYMDVWGTGTQVTVSS

SEQ ID NO: 5882 - protein, 8 aa, synthetic construct
  REGION 1..8: note = elipovimab heavy chain CDR1
GASISDSY

SEQ ID NO: 5883 - protein, 7 aa, synthetic construct
  REGION 1..7: note = elipovimab heavy chain CDR2
VHKSGDT

SEQ ID NO: 5884 - protein, 26 aa, synthetic construct
  REGION 1..26: note = elipovimab heavy chain CDR3
ARTLHGRRIYGIVAFNEWFTYFYMDV

SEQ ID NO: 5885 - protein, 105 aa, synthetic construct
  REGION 1..105: note = elipovimab light chain V region
SDISVAPGETARISCGEKSLGSRAVQWYQHRAGQAPSLIIYNNQDRPSGIPERFSGSPDSRPGTTATLTITSVEAGDEADYYCHIWDSRVPTKWVFGGGTTLTVL

SEQ ID NO: 5886 - protein, 6 aa, synthetic construct
  REGION 1..6: note = elipovimab light chain CDR1
SLGSRA

SEQ ID NO: 5887 - skipped

SEQ ID NO: 5888 - protein, 13 aa, synthetic construct
  REGION 1..13: note = elipovimab light chain CDR3
CHIWDSRVPTKWV

SEQ ID NO: 5889 - protein, 119 aa, synthetic construct
  REGION 1..119: note = elotuzumab heavy chain V region
EVQLVESGGGLVQPGGSLRLSCAASGFDFSRYWMSWVRQAPGKGLEWIGEINPDSSTINYAPSLKDKFIISRDNAKNSLYLQMNSLRAEDTAVYYCARPDGNYWYFDVWGQGTLVTVSS

SEQ ID NO: 5890 - protein, 8 aa, synthetic construct
  REGION 1..8: note = elotuzumab heavy chain CDR1
GFDFSRYW

SEQ ID NO: 5891 - protein, 8 aa, synthetic construct
  REGION 1..8: note = elotuzumab heavy chain CDR2
INPDSSTI

SEQ ID NO: 5892 - protein, 12 aa, synthetic construct
  REGION 1..12: note = elotuzumab heavy chain CDR3
ARPDGNYWYFDV

SEQ ID NO: 5893 - protein, 107 aa, synthetic construct
  REGION 1..107: note = elotuzumab light chain V region
DIQMTQSPSSLSASVGDRVTITCKASQDVGIAVAWYQQKPGKVPKLLIYWASTRHTGVPDRFSGSGSGTDFTLTISSLQPEDVATYYCQQYSSYPYTFGQGTKVEIK

SEQ ID NO: 5894 - protein, 6 aa, synthetic construct
  REGION 1..6: note = elotuzumab light chain CDR1
QDVGIA

SEQ ID NO: 5895 - skipped

SEQ ID NO: 5896 - protein, 9 aa, synthetic construct
  REGION 1..9: note = elotuzumab light chain CDR3
QQYSSYPYT

SEQ ID NO: 5897 - protein, 115 aa, synthetic construct
  REGION 1..115: note = elranatamab heavy chain V region
EVQLLESGGGLVQPGGSLRLSCAASGFTFSSYPMSWVRQAPGKGLEWVSAIGGSGGSLPYADIVKGRFTISRDNSKNTLYLQMNSLRAEDTAVYYCARYWPMDIWGQGTLVTVSS

SEQ ID NO: 5898 - protein, 8 aa, synthetic construct
  REGION 1..8: note = elranatamab heavy chain CDR1
GFTFSSYP

SEQ ID NO: 5899 - protein, 8 aa, synthetic construct
  REGION 1..8: note = elranatamab heavy chain CDR2
IGGSGGSL

SEQ ID NO: 5900 - protein, 8 aa, synthetic construct
  REGION 1..8: note = elranatamab heavy chain CDR3
ARYWPMDI

SEQ ID NO: 5901 - protein, 108 aa, synthetic construct
  REGION 1..108: note = elranatamab light chain V region
EIVLTQSPGTLSLSPGERATLSCRASQSVSSSYLAWYQQKPGQAPRLLMYDASIRATGIPDRFSGSGSGTDFTLTISRLEPEDFAVYYCQQYQSWPLTFGQGTKVEIK

SEQ ID NO: 5902 - protein, 7 aa, synthetic construct
  REGION 1..7: note = elranatamab light chain CDR1
QSVSSSY

SEQ ID NO: 5903 - skipped

SEQ ID NO: 5904 - protein, 9 aa, synthetic construct
  REGION 1..9: note = elranatamab light chain CDR3
QQYQSWPLT

SEQ ID NO: 5905 - protein, 123 aa, synthetic construct
  REGION 1..123: note = emapalumab heavy chain V region
EVQLLESGGGLVQPGGSLRLSCAASGFTFSSYAMSWVRQAPGKGLEWVSAISGSGGSTYYADSVKGRFTISRDNSKNTLYLQMNSLRAEDTAVYYCAKDGSSGWYVPHWFDPWGQGTLVTVSS

SEQ ID NO: 5906 - protein, 8 aa, synthetic construct
  REGION 1..8: note = emapalumab heavy chain CDR1
GFTFSSYA

SEQ ID NO: 5907 - protein, 8 aa, synthetic construct
  REGION 1..8: note = emapalumab heavy chain CDR2
ISGSGGST

SEQ ID NO: 5908 - protein, 16 aa, synthetic construct
  REGION 1..16: note = emapalumab heavy chain CDR3
AKDGSSGWYVPHWFDP

SEQ ID NO: 5909 - protein, 111 aa, synthetic construct
  REGION 1..111: note = emapalumab light chain V region
NFMLTQPHSVSESPGKTVTISCTRSSGSIASNYVQWYQQRPGSSPTTVIYEDNQRPSGVPDRFSGSIDSSSNSASLTISGLKTEDEADYYCQSYDGSNRWMFGGGTKLTVL

SEQ ID NO: 5910 - protein, 8 aa, synthetic construct
  REGION 1..8: note = emapalumab light chain CDR1
SGSIASNY

SEQ ID NO: 5911 - skipped

SEQ ID NO: 5912 - protein, 10 aa, synthetic construct
  REGION 1..10: note = emapalumab light chain CDR3
QSYDGSNRWM

SEQ ID NO: 5913 - protein, 116 aa, synthetic construct
  REGION 1..116: note = enapotamab heavy chain V region
EVQLLESGGGLVQPGGSLRLSCAASGFTFSSYAMNWVRQAPGKGLEWVSTTSGSGASTYYADSVKGRFTISRDNSKNTLYLQMNSLRAEDTAVYYCAKIWIAFDIWGQGTMVTVSS

SEQ ID NO: 5914 - protein, 8 aa, synthetic construct
  REGION 1..8: note = enapotamab heavy chain CDR1
GFTFSSYA

SEQ ID NO: 5915 - protein, 8 aa, synthetic construct
  REGION 1..8: note = enapotamab heavy chain CDR2
TSGSGAST

SEQ ID NO: 5916 - protein, 9 aa, synthetic construct
  REGION 1..9: note = enapotamab heavy chain CDR3
AKIWIAFDI

SEQ ID NO: 5917 - protein, 108 aa, synthetic construct
  REGION 1..108: note = enapotamab light chain V region
EIVLTQSPGTLSLSPGERATLSCRASQSVSSSYLAWYQQKPGQAPRLLIYGASSRATGIPDRFSGSGSGTDFTLTISRLEPEDFAVYYCQQYGSSPYTFGQGTKLEIK

SEQ ID NO: 5918 - protein, 7 aa, synthetic construct
  REGION 1..7: note = enapotamab light chain CDR1
QSVSSSY

SEQ ID NO: 5919 - skipped

SEQ ID NO: 5920 - protein, 9 aa, synthetic construct
  REGION 1..9: note = enapotamab light chain CDR3
QQYGSSPYT

SEQ ID NO: 5921 - protein, 116 aa, synthetic construct; identical to SEQ ID NO: 5913
  REGION 1..116: note = enapotamab vedotin heavy chain V region

SEQ ID NO: 5922 - protein, 8 aa, synthetic construct
  REGION 1..8: note = enapotamab vedotin heavy chain CDR1
GFTFSSYA

SEQ ID NO: 5923 - protein, 8 aa, synthetic construct
  REGION 1..8: note = enapotamab vedotin heavy chain CDR2
TSGSGAST

SEQ ID NO: 5924 - protein, 9 aa, synthetic construct
  REGION 1..9: note = enapotamab vedotin heavy chain CDR3
AKIWIAFDI

SEQ ID NO: 5925 - protein, 108 aa, synthetic construct; identical to SEQ ID NO: 5917
  REGION 1..108: note = enapotamab vedotin light chain V region

SEQ ID NO: 5926 - protein, 8 aa, synthetic construct
  REGION 1..8: note = enapotamab vedotin light chain CDR1
QSVSSSYL

SEQ ID NO: 5927 - skipped

SEQ ID NO: 5928 - protein, 9 aa, synthetic construct
  REGION 1..9: note = enapotamab vedotin light chain CDR3
QQYGSSPYT

SEQ ID NO: 5929 - protein, 117 aa, synthetic construct
  REGION 1..117: note = enfortumab vedotin heavy chain V region
EVQLVESGGGLVQPGGSLRLSCAASGFTFSSYNMNWVRQAPGKGLEWVSYISSSSSTIYYADSVKGRFTISRDNAKNSLSLQMNSLRDEDTAVYYCARAYYYGMDVWGQGTTVTVSS

SEQ ID NO: 5930 - protein, 8 aa, synthetic construct
  REGION 1..8: note = enfortumab vedotin heavy chain CDR1
GFTFSSYN

SEQ ID NO: 5931 - protein, 8 aa, synthetic construct
  REGION 1..8: note = enfortumab vedotin heavy chain CDR2
ISSSSSTI

SEQ ID NO: 5932 - protein, 10 aa, synthetic construct
  REGION 1..10: note = enfortumab vedotin heavy chain CDR3
ARAYYYGMDV

SEQ ID NO: 5933 - protein, 107 aa, synthetic construct
  REGION 1..107: note = enfortumab vedotin light chain V region
DIQMTQSPSSVSASVGDRVTITCRASQGISGWLAWYQQKPGKAPKFLIYAASTLQSGVPSRFSGSGSGTDFTLTISSLQPEDFATYYCQQANSFPPTFGGGTKVEIK

SEQ ID NO: 5934 - protein, 6 aa, synthetic construct
  REGION 1..6: note = enfortumab vedotin light chain CDR1
QGISGW

SEQ ID NO: 5935 - skipped

SEQ ID NO: 5936 - protein, 9 aa, synthetic construct
  REGION 1..9: note = enfortumab vedotin light chain CDR3
QQANSFPPT

SEQ ID NO: 5937 - protein, 122 aa, synthetic construct
  REGION 1..122: note = enoblituzumab heavy chain V region
EVQLVESGGGLVQPGGSLRLSCAASGFTFSSFGMHWVRQAPGKGLEWVAYISSDSSAIYYADTVKGRFTISRDNAKNSLYLQMNSLRDEDTAVYYCGRGRENIYYGSRLDYWGQGTTVTVSS

SEQ ID NO: 5938 - protein, 8 aa, synthetic construct
  REGION 1..8: note = enoblituzumab heavy chain CDR1
GFTFSSFG

SEQ ID NO: 5939 - protein, 8 aa, synthetic construct
  REGION 1..8: note = enoblituzumab heavy chain CDR2
ISSDSSAI

SEQ ID NO: 5940 - protein, 15 aa, synthetic construct
  REGION 1..15: note = enoblituzumab heavy chain CDR3
GRGRENIYYGSRLDY

SEQ ID NO: 5941 - protein, 107 aa, synthetic construct
  REGION 1..107: note = enoblituzumab light chain V region
DIQLTQSPSFLSASVGDRVTITCKASQNVDTNVAWYQQKPGKAPKALIYSASYRYSGVPSRFSGSGSGTDFTLTISSLQPEDFATYYCQQYNNYPFTFGQGTKLEIK

SEQ ID NO: 5942 - protein, 7 aa, synthetic construct
  REGION 1..7: note = enoblituzumab light chain CDR1
QNVDTNV

SEQ ID NO: 5943 - skipped

SEQ ID NO: 5944 - protein, 9 aa, synthetic construct
  REGION 1..9: note = enoblituzumab light chain CDR3
QQYNNYPFT

SEQ ID NO: 5945 - protein, 123 aa, synthetic construct
  REGION 1..123: note = enoticumab heavy chain V region
QVQLVESGGGVVQPGRSLRLSCAASGFTFSSYGMHWVRQAPGKGLEWVSFLWYDGTNKNYVESVKGRFTISRDNSKNMLYLEMNSLRAEDTAVYYCARDHDFRSGYEGWFDPWGQGTLVTVSS

SEQ ID NO: 5946 - protein, 7 aa, synthetic construct
  REGION 1..7: note = enoticumab heavy chain CDR1
GFTFSSY

SEQ ID NO: 5947 - protein, 8 aa, synthetic construct
  REGION 1..8: note = enoticumab heavy chain CDR2
LWYDGTNK

SEQ ID NO: 5948 - protein, 16 aa, synthetic construct
  REGION 1..16: note = enoticumab heavy chain CDR3
ARDHDFRSGYEGWFDP

SEQ ID NO: 5949 - protein, 107 aa, synthetic construct
  REGION 1..107: note = enoticumab light chain V region
EIVLTQSPATLSLSPGERATLSCRASQSVSSYLAWYQQKPGQAPRLLIYDASNRATGIPARFSGSGSGTDFTLTISSLEPEDFAVYYCQHRSNWPPTFGGGTKVEIK

SEQ ID NO: 5950 - protein, 7 aa, synthetic construct
  REGION 1..7: note = enoticumab light chain CDR1
QSVSSYL

SEQ ID NO: 5951 - skipped

SEQ ID NO: 5952 - protein, 9 aa, synthetic construct
  REGION 1..9: note = enoticumab light chain CDR3
QHRSNWPPT

SEQ ID NO: 5953 - protein, 118 aa, synthetic construct
  REGION 1..118: note = enuzovimab heavy chain V region
EVQLVESGGGLIQPGGSLRLSCAASGFIVSSNYMSWVRQAPGKGLEWVSIIYSGGSTFYADSVKGRFTISRDNSKNTLYLQMNSLRVEDTAVYYCARDLQELGSLDYWGQGTLVTVSS

SEQ ID NO: 5954 - protein, 8 aa, synthetic construct
  REGION 1..8: note = enuzovimab heavy chain CDR1
GFIVSSNY

SEQ ID NO: 5955 - protein, 7 aa, synthetic construct
  REGION 1..7: note = enuzovimab heavy chain CDR2
IYSGGST

SEQ ID NO: 5956 - protein, 12 aa, synthetic construct
  REGION 1..12: note = enuzovimab heavy chain CDR3
ARDLQELGSLDY

SEQ ID NO: 5957 - protein, 107 aa, synthetic construct
  REGION 1..107: note = enuzovimab light chain V region
DIQMTQSPSSVSASVGDRVTITCRASQGISSWLAWYQQKPGKAPKLLIYAASSLQSGVPSRFSGSGSGTDFTLTISSLQPEDFATYYCQEANSFPYTFGQGTKLEIK

SEQ ID NO: 5958 - protein, 6 aa, synthetic construct
  REGION 1..6: note = enuzovimab light chain CDR1
QGISSW

SEQ ID NO: 5959 - skipped

SEQ ID NO: 5960 - protein, 9 aa, synthetic construct
  REGION 1..9: note = enuzovimab light chain CDR3
QEANSFPYT

SEQ ID NO: 5961 - protein, 125 aa, synthetic construct
  REGION 1..125: note = epcoritamab heavy chain V region
EVKLVESGGGLVQPGGSLRLSCAASGFTFNTYAMNWVRQAPGKGLEWVARIRSKYNNYATYYADSVKDRFTISRDDSKSSLYLQMNNLKTEDTAMYYCVRHGNFGNSYVSWFAYWGQGTLVTVSS

SEQ ID NO: 5962 - protein, 8 aa, synthetic construct
  REGION 1..8: note = epcoritamab heavy chain CDR1
GFTFNTYA

SEQ ID NO: 5963 - protein, 10 aa, synthetic construct
  REGION 1..10: note = epcoritamab heavy chain CDR2
IRSKYNNYAT

SEQ ID NO: 5964 - protein, 16 aa, synthetic construct
  REGION 1..16: note = epcoritamab heavy chain CDR3
VRHGNFGNSYVSWFAY

SEQ ID NO: 5965 - protein, 109 aa, synthetic construct
  REGION 1..109: note = epcoritamab light chain V region
QAVVTQEPSFSVSPGGTVTLTCRSSTGAVTTSNYANWVQQTPGQAFRGLIGGTNKRAPGVPARFSGSLIGDKAALTITGAQADDESIYFCALWYSNLWVFGGGTKLTVL

SEQ ID NO: 5966 - protein, 9 aa, synthetic construct
  REGION 1..9: note = epcoritamab light chain CDR1
TGAVTTSNY

SEQ ID NO: 5967 - skipped

SEQ ID NO: 5968 - protein, 9 aa, synthetic construct
  REGION 1..9: note = epcoritamab light chain CDR3
ALWYSNLWV

SEQ ID NO: 5969 - protein, 111 aa, synthetic construct
  REGION 1..111: note = eptinezumab heavy chain V region
EVQLVESGGGLVQPGGSLRLSCAVSGIDLSGYYMNWVRQAPGKGLEWVGVIGINGATYYASWAKGRFTISRDNSKTTVYLQMNSLRAEDTAVYFCARGDIWGQGTLVTVSS

SEQ ID NO: 5970 - protein, 8 aa, synthetic construct
  REGION 1..8: note = eptinezumab heavy chain CDR1
GIDLSGYY

SEQ ID NO: 5971 - protein, 7 aa, synthetic construct
  REGION 1..7: note = eptinezumab heavy chain CDR2
IGINGAT

SEQ ID NO: 5972 - protein, 5 aa, synthetic construct
  REGION 1..5: note = eptinezumab heavy chain CDR3
ARGDI

SEQ ID NO: 5973 - protein, 112 aa, synthetic construct
  REGION 1..112: note = eptinezumab light chain V region
QVLTQSPSSLSASVGDRVTINCQASQSVYHNTYLAWYQQKPGKVPKQLIYDASTLASGVPSRFSGSGSGTDFTLTISSLQPEDVATYYCLGSYDCTNGDCFVFGGGTKVEIK

SEQ ID NO: 5974 - protein, 7 aa, synthetic construct
  REGION 1..7: note = eptinezumab light chain CDR1
QSVYHNT

SEQ ID NO: 5975 - skipped

SEQ ID NO: 5976 - protein, 13 aa, synthetic construct
  REGION 1..13: note = eptinezumab light chain CDR3
LGSYDCTNGDCFV

SEQ ID NO: 5977 - protein, 130 aa, synthetic construct [sequence omitted]

SEQ ID NO: 5978 - protein, 8 aa, synthetic construct
  REGION 1..8: note = erenumab heavy chain CDR1
GFTFSSFG

SEQ ID NO: 5979 - protein, 8 aa, synthetic construct
  REGION 1..8: note = erenumab heavy chain CDR2
ISFDGSIK

SEQ ID NO: 5980 - protein, 23 aa, synthetic construct
  REGION 1..23: note = erenumab heavy chain CDR3
ARDRLNYYDSSGYYHYKYYGMAV

SEQ ID NO: 5981 - protein, 110 aa, synthetic construct
  REGION 1..110: note = erenumab light chain V region
QSVLTQPPSVSAAPGQKVTISCSGSSSNIGNNYVSWYQQLPGTAPKLLIYDNNKRPSGIPDRFSGSKSGTSTTLGITGLQTGDEADYYCGTWDSRLSAVVFGGGTKLTVL

SEQ ID NO: 5982 - protein, 8 aa, synthetic construct
  REGION 1..8: note = erenumab light chain CDR1
SSNIGNNY

SEQ ID NO: 5983 - skipped

SEQ ID NO: 5984 - protein, 11 aa, synthetic construct
  REGION 1..11: note = erenumab light chain CDR3
GTWDSRLSAVV

SEQ ID NO: 5985 - protein, 117 aa, synthetic construct
  REGION 1..117: note = etaracizumab heavy chain V region
QVQLVESGGGVVQPGRSLRLSCAASGFTFSSYDMSWVRQAPGKGLEWVAKVSSGGGSTYYLDTVQGRFTISRDNSKNTLYLQMNSLRAEDTAVYYCARHLHGSFASWGQGTTVTVSS

SEQ ID NO: 5986 - protein, 8 aa, synthetic construct
  REGION 1..8: note = etaracizumab heavy chain CDR1
GFTFSSYD

SEQ ID NO: 5987 - protein, 8 aa, synthetic construct
  REGION 1..8: note = etaracizumab heavy chain CDR2
VSSGGGST

SEQ ID NO: 5988 - protein, 10 aa, synthetic construct
  REGION 1..10: note = etaracizumab heavy chain CDR3
ARHLHGSFAS

SEQ ID NO: 5989 - protein, 107 aa, synthetic construct
  REGION 1..107: note = etaracizumab light chain V region
EIVLTQSPATLSLSPGERATLSCQASQSISNFLHWYQQRPGQAPRLLIRYRSQSISGIPARFSGSGSGTDFTLTISSLEPEDFAVYYCQQSGSWPLTFGGGTKVEIK

SEQ ID NO: 5990 - protein, 6 aa, synthetic construct
  REGION 1..6: note = etaracizumab light chain CDR1
QSISNF

SEQ ID NO: 5991 - skipped

SEQ ID NO: 5992 - protein, 9 aa, synthetic construct
  REGION 1..9: note = etaracizumab light chain CDR3
QQSGSWPLT

SEQ ID NO: 5993 - protein, 119 aa, synthetic construct; identical to SEQ ID NO: 444
  REGION 1..119: note = etesevimab heavy chain V region

SEQ ID NO: 5994 - protein, 8 aa, synthetic construct
  REGION 1..8: note = etesevimab heavy chain CDR1
GFTVSSNY

SEQ ID NO: 5995 - protein, 7 aa, synthetic construct
  REGION 1..7: note = etesevimab heavy chain CDR2
IYSGGST

SEQ ID NO: 5996 - protein, 13 aa, synthetic construct
  REGION 1..13: note = etesevimab heavy chain CDR3
ARVLPMYGDYLDY

SEQ ID NO: 5997 - protein, 109 aa, synthetic construct; identical to SEQ ID NO: 443
  REGION 1..109: note = etesevimab light chain V region

SEQ ID NO: 5998 - protein, 6 aa, synthetic construct
  REGION 1..6: note = etesevimab light chain CDR1
QSISRY

SEQ ID NO: 5999 - skipped

SEQ ID NO: 6000 - protein, 11 aa, synthetic construct
  REGION 1..11: note = etesevimab light chain CDR3
QQSYSTPPEYT

SEQ ID NO: 6001 - protein, 126 aa, synthetic construct
  REGION 1..126: note = evinacumab heavy chain V region
EVQLVESGGGVIQPGGSLRLSCAASGFTFDDYAMNWVRQGPGKGLEWVSAISGDGGSTYYADSVKGRFTISRDNSKNSLYLQMNSLRAEDTAFFYCAKDLRNTIFGVVIPDAFDIWGQGTMVTVSS

SEQ ID NO: 6002 - protein, 8 aa, synthetic construct
  REGION 1..8: note = evinacumab heavy chain CDR1
GFTFDDYA

SEQ ID NO: 6003 - protein, 8 aa, synthetic construct
  REGION 1..8: note = evinacumab heavy chain CDR2
ISGDGGST

SEQ ID NO: 6004 - protein, 19 aa, synthetic construct
  REGION 1..19: note = evinacumab heavy chain CDR3
AKDLRNTIFGVVIPDAFDI

SEQ ID NO: 6005 - protein, 107 aa, synthetic construct
  REGION 1..107: note = evinacumab light chain V region
DIQMTQSPSTLSASVGDRVTITCRASQSIRSWLAWYQQKPGKAPKLLIYKASSLESGVPSRFSGSGSGTEFTLTISSLQPDDFATYYCQQYNSYSYTFGQGTKLEIK

SEQ ID NO: 6006 - protein, 6 aa, synthetic construct
  REGION 1..6: note = evinacumab light chain CDR1
QSIRSW

SEQ ID NO: 6007 - skipped

SEQ ID NO: 6008 - protein, 9 aa, synthetic construct
  REGION 1..9: note = evinacumab light chain CDR3
QQYNSYSYT

SEQ ID NO: 6009 - protein, 115 aa, synthetic construct [sequence omitted]

SEQ ID NO: 6010 - protein, 8 aa, synthetic construct
  REGION 1..8: note = evolocumab heavy chain CDR1
GYTLTSYG

SEQ ID NO: 6011 - protein, 8 aa, synthetic construct
  REGION 1..8: note = evolocumab heavy chain CDR2
VSFYNGNT

SEQ ID NO: 6012 - protein, 8 aa, synthetic construct
  REGION 1..8: note = evolocumab heavy chain CDR3
ARGYGMDV

SEQ ID NO: 6013 - protein, 109 aa, synthetic construct [sequence omitted]

SEQ ID NO: 6014 - protein, 8 aa, synthetic construct
  REGION 1..8: note = evolocumab light chain CDR1
SSDVGGYN

SEQ ID NO: 6015 - skipped

SEQ ID NO: 6016 - protein, 9 aa, synthetic construct
  REGION 1..9: note = evolocumab light chain CDR3
NSYTSTSMV

SEQ ID NO: 6017 - protein, 127 aa, synthetic construct
  REGION 1..127: note = exevolimab heavy chain V region
EVQLVESGGGLVQPGGSLRLSCAASGFTFSNYAMNWVRQAPGKGLEWVSTISGSGGATRYADSVKGRFTISRDNSRNTVYLQMNSLRVEDTAVFYCTKDRLIMATVRGPYYYGMDVWGQGTTVTVSS

SEQ ID NO: 6018 - protein, 8 aa, synthetic construct
  REGION 1..8: note = exevolimab heavy chain CDR1
GFTFSNYA

SEQ ID NO: 6019 - protein, 8 aa, synthetic construct
  REGION 1..8: note = exevolimab heavy chain CDR2
ISGSGGAT

SEQ ID NO: 6020 - protein, 20 aa, synthetic construct
  REGION 1..20: note = exevolimab heavy chain CDR3
TKDRLIMATVRGPYYYGMDV

SEQ ID NO: 6021 - protein, 107 aa, synthetic construct
  REGION 1..107: note = exevolimab light chain V region
DIQMTQSPSSLSASVGDRVTITCRASQSISSYLNWYQQKPGKAPNLLIYAASSLQSGVPSRFSGSGSETDFTLTISSLQPEDFATYYCQQSHSVSFTFGPGTKVDIK

SEQ ID NO: 6022 - protein, 6 aa, synthetic construct
  REGION 1..6: note = exevolimab light chain CDR1
QSISSY

SEQ ID NO: 6023 - skipped

SEQ ID NO: 6024 - protein, 9 aa, synthetic construct
  REGION 1..9: note = exevolimab light chain CDR3
QQSHSVSFT

SEQ ID NO: 6025 - protein, 120 aa, synthetic construct
  REGION 1..120: note = exidavnemab heavy chain V region
EVQLVESGGGLVKPGGSLRLSCAASGFTFSDYWMHWVRQAPGKGLEWVGHIKSKTDAGTTDYAAPVKGRFTISRDDSKNTLYLQMNSLKTEDTAVYYCAREIYYYAFDSWGQGTLVTVSS

SEQ ID NO: 6026 - protein, 8 aa, synthetic construct
  REGION 1..8: note = exidavnemab heavy chain CDR1
GFTFSDYW

SEQ ID NO: 6027 - protein, 10 aa, synthetic construct
  REGION 1..10: note = exidavnemab heavy chain CDR2
IKSKTDAGTT

SEQ ID NO: 6028 - protein, 11 aa, synthetic construct
  REGION 1..11: note = exidavnemab heavy chain CDR3
AREIYYYAFDS

SEQ ID NO: 6029 - protein, 107 aa, synthetic construct
  REGION 1..107: note = exidavnemab light chain V region
SYELTQPLSVSVALGQTARITCSGDNIGSKYVHWYQQKPGQAPVLVIYGDNERPSGIPERFSGSNSGNTATLTISRAQAGDEADYYCQAADWVDFYVFGGGTKLTVL

SEQ ID NO: 6030 - protein, 6 aa, synthetic construct
  REGION 1..6: note = exidavnemab light chain CDR1
NIGSKY

SEQ ID NO: 6031 - skipped

SEQ ID NO: 6032 - protein, 10 aa, synthetic construct
  REGION 1..10: note = exidavnemab light chain CDR3
QAADWVDFYV

SEQ ID NO: 6033 - protein, 123 aa, synthetic construct [sequence omitted]

SEQ ID NO: 6034 - protein, 8 aa, synthetic construct
  REGION 1..8: note = faricimab heavy chain CDR1
GYDFTHYG

SEQ ID NO: 6035 - protein, 8 aa, synthetic construct
  REGION 1..8: note = faricimab heavy chain CDR2
INTYTGEP

SEQ ID NO: 6036 - protein, 16 aa, synthetic construct
  REGION 1..16: note = faricimab heavy chain CDR3
AKYPYYYGTSHWYFDV

SEQ ID NO: 6037 - protein, 107 aa, synthetic construct [sequence omitted]

SEQ ID NO: 6038 - protein, 6 aa, synthetic construct
  REGION 1..6: note = faricimab light chain CDR1
QDISNY

SEQ ID NO: 6039 - skipped

SEQ ID NO: 6040 - protein, 9 aa, synthetic construct
  REGION 1..9: note = faricimab light chain CDR3
QQYSTVPWT

SEQ ID NO: 6041 - protein, 119 aa, synthetic construct [sequence omitted]

SEQ ID NO: 6042 - protein, 8 aa, synthetic construct
  REGION 1..8: note = fasinumab heavy chain CDR1
GFTLTELS

SEQ ID NO: 6043 - protein, 8 aa, synthetic construct
  REGION 1..8: note = fasinumab heavy chain CDR2
FDPEDGET

SEQ ID NO: 6044 - protein, 12 aa, synthetic construct
  REGION 1..12: note = fasinumab heavy chain CDR3
STIFGVVTNFDN

SEQ ID NO: 6045 - protein, 107 aa, synthetic construct [sequence omitted]

SEQ ID NO: 6046 - protein, 6 aa, synthetic construct
  REGION 1..6: note = fasinumab light chain CDR1
QAIRND

SEQ ID NO: 6047 - skipped

SEQ ID NO: 6048 - protein, 9 aa, synthetic construct
  REGION 1..9: note = fasinumab light chain CDR3
QQYNRYPWT

SEQ ID NO: 6049 - protein, 121 aa, synthetic construct
  REGION 1..121: note = fezakinumab heavy chain V region
QVQLVQSGAEVKKPGASVKVSCKASGYTFTNYYMHWVRQAPGQGLEWVGWINPYTGSAFYAQKFRGRVTMTRDTSISTAYMELSRLRSDDTAVYYCAREPEKFDSDDSDVWGRGTLVTVSS

SEQ ID NO: 6050 - protein, 8 aa, synthetic construct
  REGION 1..8: note = fezakinumab heavy chain CDR1
GYTFTNYY

SEQ ID NO: 6051 - protein, 8 aa, synthetic construct
  REGION 1..8: note = fezakinumab heavy chain CDR2
INPYTGSA

SEQ ID NO: 6052 - protein, 14 aa, synthetic construct
  REGION 1..14: note = fezakinumab heavy chain CDR3
AREPEKFDSDDSDV

SEQ ID NO: 6053 - protein, 111 aa, synthetic construct
  REGION 1..111: note = fezakinumab light chain V region
QAVLTQPPSVSGAPGQRVTISCTGSSSNIGAGYGVHWYQQLPGTAPKLLIYGDSNRPSGVPDRFSGSKSGTSASLAITGLQAEDEADYYCQSYDNSLSGYVFGGGTQLTVL

SEQ ID NO: 6054-6056 - skipped (3 entries)

SEQ ID NO: 6057 - protein, 123 aa, synthetic construct
  REGION 1..123: note = fianlimab heavy chain V region
QVQLVESGGGVVQPGRSLRLSCVASGFTFSSYGMHWVRQAPGKGLEWVAIIWYDGSNKYYADSVKGRFTISRDNSKNTQYLQMNSLRAEDTAVYYCASVATSGDFDYYGMDVWGQGTTVTVSS

SEQ ID NO: 6058 - protein, 7 aa, synthetic construct
  REGION 1..7: note = fianlimab heavy chain CDR1
GFTFSSY

SEQ ID NO: 6059 - protein, 8 aa, synthetic construct
  REGION 1..8: note = fianlimab heavy chain CDR2
IWYDGSNK

SEQ ID NO: 6060 - protein, 16 aa, synthetic construct
  REGION 1..16: note = fianlimab heavy chain CDR3
ASVATSGDFDYYGMDV

SEQ ID NO: 6061 - protein, 107 aa, synthetic construct
  REGION 1..107: note = fianlimab light chain V region
EIVLTQSPATLSLSPGERTTLSCRASQRISTYLAWYQQKPGQAPRLLIYDASKRATGIPARFSGSGSGTGFTLTISSLEPEDFAVYYCQQRSNWPLTFGGGTKVEIK

SEQ ID NO: 6062 - protein, 7 aa, synthetic construct
  REGION 1..7: note = fianlimab light chain CDR1
QRISTYL

SEQ ID NO: 6063 - skipped

SEQ ID NO: 6064 - protein, 9 aa, synthetic construct
  REGION 1..9: note = fianlimab light chain CDR3
QQRSNWPLT

SEQ ID NO: 6065 - protein, 120 aa, synthetic construct
  REGION 1..120: note = fidasimtamab heavy chain V region
QVQLVQSGAEVKKPGSSVKVSCKASGGTFSSTAISWVRQAPGQGLEWMGGIWPSFGTASYAQKFQGRVTITADESTSTAYMELSSLRSEDTAVYYCARAEYSSTGIFDYWGQGTLVTVSS

SEQ ID NO: 6066 - protein, 8 aa, synthetic construct
  REGION 1..8: note = fidasimtamab heavy chain CDR1
GGTFSSTA

SEQ ID NO: 6067 - protein, 9 aa, synthetic construct
  REGION 1..9: note = fidasimtamab heavy chain CDR2
IWPSFGTAS

SEQ ID NO: 6068 - protein, 13 aa, synthetic construct
  REGION 1..13: note = fidasimtamab heavy chain CDR3
ARAEYSSTGIFDY

SEQ ID NO: 6069 - protein, 107 aa, synthetic construct
  REGION 1..107: note = fidasimtamab light chain V region
DIQMTQSPSSVSASVGDRVTITCRASQGISSWLAWYQQKPGKAPKLLISAASSLQSGVPSRFSGSGSGTDFTLTISSLQPEDFATYYCQQANHLPFTFGGGTKVEIK

SEQ ID NO: 6070 - protein, 6 aa, synthetic construct
  REGION 1..6: note = fidasimtamab light chain CDR1
QGISSW

SEQ ID NO: 6071 - skipped

SEQ ID NO: 6072 - protein, 9 aa, synthetic construct
  REGION 1..9: note = fidasimtamab light chain CDR3
QQANHLPFT

SEQ ID NO: 6073 - protein, 125 aa, synthetic construct [sequence omitted]

SEQ ID NO: 6074 - protein, 7 aa, synthetic construct
  REGION 1..7: note = figitumumab heavy chain CDR1
GFTFSSY

SEQ ID NO: 6075 - protein, 8 aa, synthetic construct
  REGION 1..8: note = figitumumab heavy chain CDR2
ISGSGGTT

SEQ ID NO: 6076 - protein, 18 aa, synthetic construct
  REGION 1..18: note = figitumumab heavy chain CDR3
AKDLGWSDSYYYYYGMDV

SEQ ID NO: 6077 - protein, 107 aa, synthetic construct [sequence omitted]

SEQ ID NO: 6078 - protein, 6 aa, synthetic construct
  REGION 1..6: note = figitumumab light chain CDR1
QGIRND

SEQ ID NO: 6079 - skipped

SEQ ID NO: 6080 - protein, 9 aa, synthetic construct
  REGION 1..9: note = figitumumab light chain CDR3
LQHNSYPCS

SEQ ID NO: 6081 - protein, 123 aa, synthetic construct
  REGION 1..123: note = firivumab heavy chain V region
QVQLVQSGAEVKMPGSSVKVSCKTSGVFFSSHAISWVRQAPGQGLEWMGGISPMFGTTHYAQKFQGRVTITADQSTTTAYMELTSLTSEDTAVYYCARDGAGSYYPLNWFDPWGQGTLVTVSS

SEQ ID NO: 6082 - protein, 8 aa, synthetic construct
  REGION 1..8: note = firivumab heavy chain CDR1
GVFFSSHA

SEQ ID NO: 6083 - protein, 8 aa, synthetic construct
  REGION 1..8: note = firivumab heavy chain CDR2
ISPMFGTT

SEQ ID NO: 6084 - protein, 16 aa, synthetic construct
  REGION 1..16: note = firivumab heavy chain CDR3
ARDGAGSYYPLNWFDP

SEQ ID NO: 6085 - protein, 107 aa, synthetic construct
  REGION 1..107: note = firivumab light chain V region
EIVLTQSPATLSLSPGERATLSCRASENIWNNLAWYQQKPGQAPRLLISGASTGATGVPSRFRGSGSRTEFTLTISSLQSEDFAIYFCQQYNSWPRTFGPGTKVEIK

SEQ ID NO: 6086 - protein, 6 aa, synthetic construct
  REGION 1..6: note = firivumab light chain CDR1
ENIWNN

SEQ ID NO: 6087 - skipped

SEQ ID NO: 6088 - protein, 9 aa, synthetic construct
  REGION 1..9: note = firivumab light chain CDR3
QQYNSWPRT

SEQ ID NO: 6089 - protein, 119 aa, synthetic construct
  REGION 1..119: note = flanvotumab heavy chain V region
QVQLVQSGSELKKPGASVKISCKASGYTFTSYAMNWVRQAPGQGLESMGWINTNTGNPTYAQGFTGRFVFSMDTSVSTAYLQISSLKAEDTAIYYCAPRYSSSWYLDYWGQGTLVTVSS

SEQ ID NO: 6090 - protein, 7 aa, synthetic construct
  REGION 1..7: note = flanvotumab heavy chain CDR1
GYTFTSY

SEQ ID NO: 6091 - protein, 8 aa, synthetic construct
  REGION 1..8: note = flanvotumab heavy chain CDR2
INTNTGNP

SEQ ID NO: 6092 - protein, 12 aa, synthetic construct
  REGION 1..12: note = flanvotumab heavy chain CDR3
APRYSSSWYLDY

SEQ ID NO: 6093 - protein, 108 aa, synthetic construct
  REGION 1..108: note = flanvotumab light chain V region
EIVLTQSPATLSLSPGERATLSCRASQSVSSYLAWYQQKPGQAPRLLIYDASNRATGIPARFSGSGSGTDFTLTISSLEPEDFAVYYCQQRSNWLMYTFGQGTKLEIK

SEQ ID NO: 6094 - protein, 6 aa, synthetic construct
  REGION 1..6: note = flanvotumab light chain CDR1
QSVSSY

SEQ ID NO: 6095 - skipped

SEQ ID NO: 6096 - protein, 10 aa, synthetic construct
  REGION 1..10: note = flanvotumab light chain CDR3
QQRSNWLMYT

SEQ ID NO: 6097 - protein, 127 aa, synthetic construct [sequence omitted]

SEQ ID NO: 6098 - protein, 8 aa, synthetic construct
  REGION 1..8: note = fletikumab heavy chain CDR1
GYTFTNDI

SEQ ID NO: 6099 - protein, 8 aa, synthetic construct
  REGION 1..8: note = fletikumab heavy chain CDR2
INAGYGNT

SEQ ID NO: 6100 - protein, 20 aa, synthetic construct
  REGION 1..20: note = fletikumab heavy chain CDR3
AREPLWFGESSPHDYYGMDV

SEQ ID NO: 6101 - protein, 107 aa, synthetic construct [sequence omitted]

SEQ ID NO: 6102 - protein, 6 aa, synthetic construct
  REGION 1..6: note = fletikumab light chain CDR1
QGISSA

SEQ ID NO: 6103 - skipped

SEQ ID NO: 6104 - protein, 9 aa, synthetic construct
  REGION 1..9: note = fletikumab light chain CDR3
QQFNSYPLT

SEQ ID NO: 6105 - protein, 118 aa, synthetic construct [sequence omitted]

SEQ ID NO: 6106 - protein, 8 aa, synthetic construct
  REGION 1..8: note = foralumab heavy chain CDR1
GFKFSGYG

SEQ ID NO: 6107 - protein, 8 aa, synthetic construct
  REGION 1..8: note = foralumab heavy chain CDR2
IWYDGSKK

SEQ ID NO: 6108 - protein, 11 aa, synthetic construct
  REGION 1..11: note = foralumab heavy chain CDR3
ARQMGYWHFDL

SEQ ID NO: 6109 - protein, 108 aa, synthetic construct [sequence omitted]

SEQ ID NO: 6110 - protein, 6 aa, synthetic construct
  REGION 1..6: note = foralumab light chain CDR1
QSVSSY

SEQ ID NO: 6111 - skipped

SEQ ID NO: 6112 - protein, 10 aa, synthetic construct
  REGION 1..10: note = foralumab light chain CDR3
QQRSNWPPLT

SEQ ID NO: 6113 - protein, 119 aa, synthetic construct
  REGION 1..119: note = foravirumab heavy chain V region
QVQLVESGGGAVQPGRSLRLSCAASGFTFSSYGMHWVRQAPGKGLEWVAVILYDGSDKFYADSVKGRFTISRDNSKNTLYLQMNSLRAEDTAVYYCAKVAVAGTHFDYWGQGTLVTVSS

SEQ ID NO: 6114 - protein, 7 aa, synthetic construct
  REGION 1..7: note = foravirumab heavy chain CDR1
GFTFSSY

SEQ ID NO: 6115 - protein, 8 aa, synthetic construct
  REGION 1..8: note = foravirumab heavy chain CDR2
ILYDGSDK

SEQ ID NO: 6116 - protein, 12 aa, synthetic construct
  REGION 1..12: note = foravirumab heavy chain CDR3
AKVAVAGTHFDY

SEQ ID NO: 6117 - protein, 107 aa, synthetic construct
  REGION 1..107: note = foravirumab light chain V region
DIQMTQSPSSLSASVGDRVTITCRASQGIRNDLGWYQQKPGKAPKLLIYAASSLQSGVPSRFSGSGSGTDFTLTISSLQPEDFATYYCQQLNSYPPTFGGGTKVEIK

SEQ ID NO: 6118 - protein, 6 aa, synthetic construct
  REGION 1..6: note = foravirumab light chain CDR1
QGIRND

SEQ ID NO: 6119 - skipped

SEQ ID NO: 6120 - protein, 9 aa, synthetic construct
  REGION 1..9: note = foravirumab light chain CDR3
QQLNSYPPT

SEQ ID NO: 6121 - protein, 122 aa, synthetic construct
  REGION 1..122: note = fremanezumab heavy chain V region
EVQLVESGGGLVQPGGSLRLSCAASGFTFSNYWISWVRQAPGKGLEWVAEIRSESDASATHYAEAVKGRFTISRDNAKNSLYLQMNSLRAEDTAVYYCLAYFDYGLAIQNYWGQGTLVTVSS

SEQ ID NO: 6122 - protein, 8 aa, synthetic construct
  REGION 1..8: note = fremanezumab heavy chain CDR1
GFTFSNYW

SEQ ID NO: 6123 - protein, 10 aa, synthetic construct
  REGION 1..10: note = fremanezumab heavy chain CDR2
IRSESDASAT

SEQ ID NO: 6124 - protein, 13 aa, synthetic construct
  REGION 1..13: note = fremanezumab heavy chain CDR3
LAYFDYGLAIQNY

SEQ ID NO: 6125 - protein, 107 aa, synthetic construct
  REGION 1..107: note = fremanezumab light chain V region
EIVLTQSPATLSLSPGERATLSCKASKRVTTYVSWYQQKPGQAPRLLIYGASNRYLGIPARFSGSGSGTDFTLTISSLEPEDFAVYYCSQSYNYPYTFGQGTKLEIK

SEQ ID NO: 6126 - protein, 6 aa, synthetic construct
  REGION 1..6: note = fremanezumab light chain CDR1
KRVTTY

SEQ ID NO: 6127 - skipped

SEQ ID NO: 6128 - protein, 9 aa, synthetic construct
  REGION 1..9: note = fremanezumab light chain CDR3
SQSYNYPYT

SEQ ID NO: 6129 - protein, 120 aa, synthetic construct
  REGION 1..120: note = fresolimumab heavy chain V region
QVQLVQSGAEVKKPGSSVKVSCKASGYTFSSNVISWVRQAPGQGLEWMGGVIPIVDIANYAQRFKGRVTITADESTSTTYMELSSLRSEDTAVYYCASTLGLVLDAMDYWGQGTLVTVSS

SEQ ID NO: 6130 - protein, 8 aa, synthetic construct
  REGION 1..8: note = fresolimumab heavy chain CDR1
GYTFSSNV

SEQ ID NO: 6131 - protein, 8 aa, synthetic construct
  REGION 1..8: note = fresolimumab heavy chain CDR2
VIPIVDIA

SEQ ID NO: 6132 - protein, 13 aa, synthetic construct
  REGION 1..13: note = fresolimumab heavy chain CDR3
ASTLGLVLDAMDY

SEQ ID NO: 6133 - protein, 108 aa, synthetic construct
  REGION 1..108: note = fresolimumab light chain V region
ETVLTQSPGTLSLSPGERATLSCRASQSLGSSYLAWYQQKPGQAPRLLIYGASSRAPGIPDRFSGSGSGTDFTLTISRLEPEDFAVYYCQQYADSPITFGQGTRLEIK

SEQ ID NO: 6134 - protein, 6 aa, synthetic construct
  REGION 1..6: note = fresolimumab light chain CDR1
QSLGSS

SEQ ID NO: 6135 - skipped

SEQ ID NO: 6136 - protein, 9 aa, synthetic construct
  REGION 1..9: note = fresolimumab light chain CDR3
QQYADSPIT

SEQ ID NO: 6137 - protein, 123 aa, synthetic construct
  REGION 1..123: note = fulranumab heavy chain V region
EVQLVESGGGLVQPGGSLRLSCAASGFTLRSYSMNWVRQAPGKGLEWVSYISRSSHTIFYADSVKGRFTISRDNAKNSLYLQMDSLRDEDTAMYYCARVYSSGWHVSDYFDYWGQGILVTVSS

SEQ ID NO: 6138 - protein, 8 aa, synthetic construct
  REGION 1..8: note = fulranumab heavy chain CDR1
GFTLRSYS

SEQ ID NO: 6139 - protein, 8 aa, synthetic construct
  REGION 1..8: note = fulranumab heavy chain CDR2
ISRSSHTI

SEQ ID NO: 6140 - protein, 16 aa, synthetic construct
  REGION 1..16: note = fulranumab heavy chain CDR3
ARVYSSGWHVSDYFDY

SEQ ID NO: 6141 - protein, 107 aa, synthetic construct [sequence omitted]

SEQ ID NO: 6142 - protein, 6 aa, synthetic construct
  REGION 1..6: note = fulranumab light chain CDR1
QGISSA

SEQ ID NO: 6143 - skipped

SEQ ID NO: 6144 - protein, 9 aa, synthetic construct
  REGION 1..9: note = fulranumab light chain CDR3
QQFNSYPLT

SEQ ID NO: 6145 - protein, 119 aa, synthetic construct
  REGION 1..119: note = galcanezumab heavy chain V region
QVQLVQSGAEVKKPGSSVKVSCKASGYTFGNYWMQWVRQAPGQGLEWMGAIYEGTGKTVYIQKFADRVTITADKSTSTAYMELSSLRSEDTAVYYCARLSDYVSGFGYWGQGTTVTVSS

SEQ ID NO: 6146 - protein, 8 aa, synthetic construct
  REGION 1..8: note = galcanezumab heavy chain CDR1
GYTFGNYW

SEQ ID NO: 6147 - protein, 8 aa, synthetic construct
  REGION 1..8: note = galcanezumab heavy chain CDR2
IYEGTGKT

SEQ ID NO: 6148 - protein, 12 aa, synthetic construct
  REGION 1..12: note = galcanezumab heavy chain CDR3
ARLSDYVSGFGY

SEQ ID NO: 6149 - protein, 107 aa, synthetic construct
  REGION 1..107: note = galcanezumab light chain V region
DIQMTQSPSSLSASVGDRVTITCRASKDISKYLNWYQQKPGKAPKLLIYYTSGYHSGVPSRFSGSGSGTDFTLTISSLQPEDFATYYCQQGDALPPTFGGGTKVEIK

SEQ ID NO: 6150 - protein, 6 aa, synthetic construct
  REGION 1..6: note = galcanezumab light chain CDR1
KDISKY

SEQ ID NO: 6151 - skipped

SEQ ID NO: 6152 - protein, 9 aa, synthetic construct
  REGION 1..9: note = galcanezumab light chain CDR3
QQGDALPPT

SEQ ID NO: 6153 - protein, 119 aa, synthetic construct [sequence omitted]

SEQ ID NO: 6154 - protein, 9 aa, synthetic construct
  REGION 1..9: note = ganitumab heavy chain CDR1
GGSISSSNW

SEQ ID NO: 6155 - protein, 7 aa, synthetic construct
  REGION 1..7: note = ganitumab heavy chain CDR2
IYHSGST

SEQ ID NO: 6156 - protein, 12 aa, synthetic construct
  REGION 1..12: note = ganitumab heavy chain CDR3
ARWTGRTDAFDI

SEQ ID NO: 6157 - protein, 112 aa, synthetic construct [sequence omitted]

SEQ ID NO: 6158 - protein, 11 aa, synthetic construct
  REGION 1..11: note = ganitumab light chain CDR1
QSLLHSNGYNY

SEQ ID NO: 6159 - skipped

SEQ ID NO: 6160 - protein, 9 aa, synthetic construct
  REGION 1..9: note = ganitumab light chain CDR3
MQGTHWPLT

SEQ ID NO: 6161 - protein, 126 aa, synthetic construct [sequence omitted]

SEQ ID NO: 6162 - protein, 7 aa, synthetic construct
  REGION 1..7: note = gantenerumab heavy chain CDR1
GFTFSSY

SEQ ID NO: 6163 - protein, 8 aa, synthetic construct
  REGION 1..8: note = gantenerumab heavy chain CDR2
INASGTRT

SEQ ID NO: 6164 - protein, 19 aa, synthetic construct
  REGION 1..19: note = gantenerumab heavy chain CDR3
ARGKGNTHKPYGYVRYFDV

SEQ ID NO: 6165 - protein, 108 aa, synthetic construct [sequence omitted]

SEQ ID NO: 6166 - protein, 7 aa, synthetic construct
  REGION 1..7: note = gantenerumab light chain CDR1
QSVSSSY

SEQ ID NO: 6167 - skipped

SEQ ID NO: 6168 - protein, 9 aa, synthetic construct
  REGION 1..9: note = gantenerumab light chain CDR3
LQIYNMPIT

SEQ ID NO: 6169 - protein, 117 aa, synthetic construct
  REGION 1..117: note = garivulimab heavy chain V region
EVQLVESGGGLVQPGGSLRLSCAVSGFSLTSYGVHWVRQAPGKGLEWVAVIWAGGSTNYADSVKGRFTISKDTSKNTVYLQMNSLRAEDTAVYYCAKPYGTSAMDYWGQGTLVTVSS

SEQ ID NO: 6170 - protein, 8 aa, synthetic construct
  REGION 1..8: note = garivulimab heavy chain CDR1
GFSLTSYG

SEQ ID NO: 6171 - protein, 7 aa, synthetic construct
  REGION 1..7: note = garivulimab heavy chain CDR2
IWAGGST

SEQ ID NO: 6172 - protein, 11 aa, synthetic construct
  REGION 1..11: note = garivulimab heavy chain CDR3
AKPYGTSAMDY

SEQ ID NO: 6173 - protein, 108 aa, synthetic construct
  REGION 1..108: note = garivulimab light chain V region
DIQMTQSPSSLSASVGDRVTITCKASQDVGIVVAWYQQKPGKAPKLLIYWASIRHTGVPSRFSGSGSGTEFTLTISSLQPDDFATYYCQQYSNYPLYTFGQGTKVEIK

SEQ ID NO: 6174 - protein, 6 aa, synthetic construct
  REGION 1..6: note = garivulimab light chain CDR1
QDVGIV

SEQ ID NO: 6175 - skipped

SEQ ID NO: 6176 - protein, 10 aa, synthetic construct
  REGION 1..10: note = garivulimab light chain CDR3
QQYSNYPLYT

SEQ ID NO: 6177 - protein, 125 aa, synthetic construct
  REGION 1..125: note = gedivumab heavy chain V region
EVQLVESGGGVVQPGKSLRLSCAASGLTFSSYAVHWVRQAPGKGLEWVTLISYDGANQYYADSVKGRFTISRDNSKNTVYLQMNSLRPEDTAVYYCAVPGPVFGIFPPWSYFDNWGQGILVTVSS

SEQ ID NO: 6178 - protein, 7 aa, synthetic construct
  REGION 1..7: note = gedivumab heavy chain CDR1
GLTFSSY

SEQ ID NO: 6179 - protein, 8 aa, synthetic construct
  REGION 1..8: note = gedivumab heavy chain CDR2
ISYDGANQ

SEQ ID NO: 6180 - protein, 18 aa, synthetic construct
  REGION 1..18: note = gedivumab heavy chain CDR3
AVPGPVFGIFPPWSYFDN

SEQ ID NO: 6181 - protein, 109 aa, synthetic construct
  REGION 1..109: note = gedivumab light chain V region
EIVLTQSPATLSVSPGERATLSCRASQVISHNLAWYQQKPGQAPRLLIYGASTRASGIPARFSGSGSGTDYTLTITSLQSEDFAVYYCQHYSNWPPRLTFGGGTKVEIK

SEQ ID NO: 6182 - protein, 6 aa, synthetic construct
  REGION 1..6: note = gedivumab light chain CDR1
QVISHN

SEQ ID NO: 6183 - skipped

SEQ ID NO: 6184 - protein, 11 aa, synthetic construct
  REGION 1..11: note = gedivumab light chain CDR3
QHYSNWPPRLT

SEQ ID NO: 6185 - protein, 116 aa, synthetic construct [sequence omitted]

SEQ ID NO: 6186 - protein, 8 aa, synthetic construct
  REGION 1..8: note = gemtuzumab ozogamicin heavy chain CDR1
GYTITDSN

SEQ ID NO: 6187 - protein, 8 aa, synthetic construct
  REGION 1..8: note = gemtuzumab ozogamicin heavy chain CDR2
IYPYNGGT

SEQ ID NO: 6188 - protein, 9 aa, synthetic construct
  REGION 1..9: note = gemtuzumab ozogamicin heavy chain CDR3
VNGNPWLAY

SEQ ID NO: 6189 - protein, 111 aa, synthetic construct [sequence omitted]

SEQ ID NO: 6190 - protein, 10 aa, synthetic construct
  REGION 1..10: note = gemtuzumab ozogamicin light chain CDR1
ESLDNYGIRF

SEQ ID NO: 6191 - skipped

SEQ ID NO: 6192 - protein, 9 aa, synthetic construct
  REGION 1..9: note = gemtuzumab ozogamicin light chain CDR3
QQTKEVPWS

SEQ ID NO: 6193 - protein, 120 aa, synthetic construct [sequence omitted]

SEQ ID NO: 6194 - protein, 10 aa, synthetic construct
  REGION 1..10: note = gevokizumab heavy chain CDR1
GFSLSTSGMG

SEQ ID NO: 6195 - protein, 7 aa, synthetic construct
  REGION 1..7: note = gevokizumab heavy chain CDR2
IWWDGDE

SEQ ID NO: 6196 - protein, 12 aa, synthetic construct
  REGION 1..12: note = gevokizumab heavy chain CDR3
ARNRYDPPWFVD

SEQ ID NO: 6197 - protein, 107 aa, synthetic construct [sequence omitted]

SEQ ID NO: 6198 - protein, 6 aa, synthetic construct
  REGION 1..6: note = gevokizumab light chain CDR1
QDISNY

SEQ ID NO: 6199 - skipped

SEQ ID NO: 6200 - protein, 9 aa, synthetic construct
  REGION 1..9: note = gevokizumab light chain CDR3
LQGKMLPWT

SEQ ID NO: 6201 - protein, 121 aa, synthetic construct
  REGION 1..121: note = gimsilumab heavy chain V region
EVQLVESGGGLVQPGGSLRLSCAASGFTFSRHWMHWLRQVPGKGPVWVSRINGAGTSITYADSVRGRFTISRDNANNTLFLQMNSLRADDTALYFCARANSVWFRGLFDYWGQGTPVTVSS

SEQ ID NO: 6202 - protein, 8 aa, synthetic construct
  REGION 1..8: note = gimsilumab heavy chain CDR1
GFTFSRHW

SEQ ID NO: 6203 - protein, 8 aa, synthetic construct
  REGION 1..8: note = gimsilumab heavy chain CDR2
INGAGTSI

SEQ ID NO: 6204 - protein, 14 aa, synthetic construct
  REGION 1..14: note = gimsilumab heavy chain CDR3
ARANSVWFRGLFDY

SEQ ID NO: 6205 - protein, 107 aa, synthetic construct
  REGION 1..107: note = gimsilumab light chain V region
EIVLTQSPVTLSVSPGERVTLSCRASQSVSTNLAWYQQKLGQGPRLLIYGASTRATDIPARFSGSGSETEFTLTISSLQSEDFAVYYCQQYDKWPDTFGQGTKLEIK

SEQ ID NO: 6206 - protein, 6 aa, synthetic construct
  REGION 1..6: note = gimsilumab light chain CDR1
QSVSTN

SEQ ID NO: 6207 - skipped

SEQ ID NO: 6208 - protein, 9 aa, synthetic construct
  REGION 1..9: note = gimsilumab light chain CDR3
QQYDKWPDT

SEQ ID NO: 6209 - protein, 124 aa, synthetic construct
  REGION 1..124: note = ginisortamab heavy chain V region
QVQLVESGAEVKKPGATVKISCKVSGYTFTDYYMHWVQQAPGKGLEWMGLVDPEDGETIYAEKFQGRVTITADTSTDTAYMELSSLRSEDTAVYYCATDARGSGSYYPNHFDYWGQGTLVTVSS

SEQ ID NO: 6210 - protein, 8 aa, synthetic construct
  REGION 1..8: note = ginisortamab heavy chain CDR1
GYTFTDYY

SEQ ID NO: 6211 - protein, 8 aa, synthetic construct
  REGION 1..8: note = ginisortamab heavy chain CDR2
VDPEDGET

SEQ ID NO: 6212 - protein, 14 aa, synthetic construct
  REGION 1..14: note = ginisortamab heavy chain CDR3
ARGSGSYYPNHFDY

SEQ ID NO: 6213 - protein, 112 aa, synthetic construct
  REGION 1..112: note = ginisortamab light chain V region
DIVMTQSPDSLAVSLGERATINCKSSQSVLYSSNNKNYLAWYQQKPGQPPKLLIYWASTRESGVPDRFSGSGSGTDFTLTINSLQAEDVAVYFCQQYYDTPTFGQGTRLEIK

SEQ ID NO: 6214 - protein, 12 aa, synthetic construct
  REGION 1..12: note = ginisortamab light chain CDR1
QSVLYSSNNKNY

SEQ ID NO: 6215 - skipped

SEQ ID NO: 6216 - protein, 8 aa, synthetic construct
  REGION 1..8: note = ginisortamab light chain CDR3
QQYYDTPT

SEQ ID NO: 6217 - protein, 119 aa, synthetic construct [sequence omitted]

SEQ ID NO: 6218 - protein, 10 aa, synthetic construct
  REGION 1..10: note = glembatumumab heavy chain CDR1
GGSISSFNYY

SEQ ID NO: 6219 - protein, 10 aa, synthetic construct
  REGION 1..10: note = glembatumumab heavy chain CDR2
IGYIYYSGST

SEQ ID NO: 6220 - protein, 11 aa, synthetic construct
  REGION 1..11: note = glembatumumab heavy chain CDR3
ARGYNWNYFDY

SEQ ID NO: 6221 - protein, 108 aa, synthetic construct [sequence omitted]

SEQ ID NO: 6222 - protein, 7 aa, synthetic construct
  REGION 1..7: note = glembatumumab light chain CDR1
QSVDNNL

SEQ ID NO: 6223 - skipped

SEQ ID NO: 6224 - protein, 10 aa, synthetic construct [sequence omitted]

SEQ ID NO: 6225 - protein, 119 aa, synthetic construct [sequence omitted]

SEQ ID NO: 6226 - protein, 10 aa, synthetic construct
  REGION 1..10: note = glembatumumab vedotin heavy chain CDR1
GGSISSFNYY

SEQ ID NO: 6227 - protein, 10 aa, synthetic construct
  REGION 1..10: note = glembatumumab vedotin heavy chain CDR2
IGYIYYSGST

SEQ ID NO: 6228 - protein, 11 aa, synthetic construct
  REGION 1..11: note = glembatumumab vedotin heavy chain CDR3
ARGYNWNYFDY

SEQ ID NO: 6229 - protein, 108 aa, synthetic construct [sequence omitted]

SEQ ID NO: 6230 - protein, 7 aa, synthetic construct
  REGION 1..7: note = glembatumumab vedotin light chain CDR1
QSVDNNL

SEQ ID NO: 6231 - skipped

SEQ ID NO: 6232 - protein, 10 aa, synthetic construct [sequence omitted]

SEQ ID NO: 6233 - protein, 117 aa, synthetic construct
  REGION 1..117: note = gosuranemab heavy chain V region
EVHLVESGGALVKPGGSLRLSCAASGFSFSKYGMSWVRQAPGKGLEWVATISSSGSRTYYPDSVKGRFTISRDNAKNTLYLQMNSLRAEDTAMYYCSISWDGAMDYWGQGTTVTVSS

SEQ ID NO: 6234 - protein, 8 aa, synthetic construct
  REGION 1..8: note = gosuranemab heavy chain CDR1
GFSFSKYG

SEQ ID NO: 6235 - protein, 8 aa, synthetic construct
  REGION 1..8: note = gosuranemab heavy chain CDR2
ISSSGSRT

SEQ ID NO: 6236 - protein, 10 aa, synthetic construct
  REGION 1..10: note = gosuranemab heavy chain CDR3
SISWDGAMDY

SEQ ID NO: 6237 - protein, 112 aa, synthetic construct
  REGION 1..112: note = gosuranemab light chain V region
DVVMTQSPLSLPVTLGQPASISCKSSQSIVHSNGNTYLEWYLQKPGQSPQLLVYKVSNRFSGVPDRFSGSGSGTDFTLKISRVEAEDVGTYYCFQGSLVPWAFGGGTKVEIK

SEQ ID NO: 6238 - protein, 11 aa, synthetic construct
  REGION 1..11: note = gosuranemab light chain CDR1
QSIVHSNGNTY

SEQ ID NO: 6239 - skipped

SEQ ID NO: 6240 - protein, 9 aa, synthetic construct
  REGION 1..9: note = gosuranemab light chain CDR3
FQGSLVPWA

SEQ ID NO: 6241 - protein, 124 aa, synthetic construct
  REGION 1..124: note = gremubamab heavy chain V region
EVQLLESGGGLVQPGGSLRLSCAASGFTFSSYAMNWVRQAPGKGLEWVSAITMSGITAYYTDDVKGRFTISRDNSKNTLYLQMNSLRAEDTAVYYCAKEEFLPGTHYYYGMDVWGQGTTVTVSS

SEQ ID NO: 6242 - protein, 7 aa, synthetic construct
  REGION 1..7: note = gremubamab heavy chain CDR1
GFTFSSY

SEQ ID NO: 6243 - protein, 8 aa, synthetic construct
  REGION 1..8: note = gremubamab heavy chain CDR2
ITMSGITA

SEQ ID NO: 6244 - protein, 17 aa, synthetic construct
  REGION 1..17: note = gremubamab heavy chain CDR3
AKEEFLPGTHYYYGMDV

SEQ ID NO: 6245 - protein, 107 aa, synthetic construct
  REGION 1..107: note = gremubamab light chain V region
AIQMTQSPSSLSASVGDRVTITCRASQGIRNDLGWYQQKPGKAPKLLIYSASTLQSGVPSRFSGSGSGTDFTLTISSLQPEDFATYYCLQDYNYPWTFGQGTKVEIK

SEQ ID NO: 6246 - protein, 6 aa, synthetic construct
  REGION 1..6: note = gremubamab light chain CDR1
QGIRND

SEQ ID NO: 6247 - skipped

SEQ ID NO: 6248 - protein, 9 aa, synthetic construct
  REGION 1..9: note = gremubamab light chain CDR3
LQDYNYPWT

SEQ ID NO: 6249 - protein, 125 aa, synthetic construct
  REGION 1..125: note = gresonitamab heavy chain 1 V region
QVQLVQSGAEVKKPGASVKVSCKASGYTFTGYYMHWVRQAPGQCLEWMGWINPNSGGTKYAQKFQGRVTMTRDTSISTAYMELSRLRSDDTAVYYCARDRITVAGTYYYYGMDVWGQGTTVTVSS

SEQ ID NO: 6250 - protein, 8 aa, synthetic construct
  REGION 1..8: note = gresonitamab heavy chain 1 CDR1
GYTFTGYY

SEQ ID NO: 6251 - protein, 9 aa, synthetic construct
  REGION 1..9: note = gresonitamab heavy chain 1 CDR2
INPNSGGTK

SEQ ID NO: 6252 - protein, 18 aa, synthetic construct
  REGION 1..18: note = gresonitamab heavy chain 1 CDR3
ARDRITVAGTYYYYGMDV

SEQ ID NO: 6253 - protein, 107 aa, synthetic construct
  REGION 1..107: note = gresonitamab light chain 1 V region
DIQMTQSPSSVSASVGDRVTITCRASQGVNNWLAWYQQKPGKAPKLLIYTASSLQSGVPSRFSGSGSGTDFTLTIRSLQPEDFATYYCQQANSFPITFGCGTRLEIK

SEQ ID NO: 6254 - protein, 6 aa, synthetic construct
  REGION 1..6: note = gresonitamab light chain 1 CDR1
QGVNNW

SEQ ID NO: 6255 - skipped

SEQ ID NO: 6256 - protein, 9 aa, synthetic construct
  REGION 1..9: note = gresonitamab light chain 1 CDR3
QQANSFPIT

SEQ ID NO: 6257 - protein, 125 aa, synthetic construct
  REGION 1..125: note = gresonitamab heavy chain 2 V region
EVQLVESGGGLVQPGGSLKLSCAASGFTFNKYAMNWVRQAPGKGLEWVARIRSKYNNYATYYADSVKDRFTISRDDSKNTAYLQMNNLKTEDTAVYYCVRHGNFGNSYISYWAYWGQGTLVTVSS

SEQ ID NO: 6258 - protein, 8 aa, synthetic construct
  REGION 1..8: note = gresonitamab heavy chain 2 CDR1
GFTFNKYA

SEQ ID NO: 6259 - protein, 10 aa, synthetic construct
  REGION 1..10: note = gresonitamab heavy chain 2 CDR2
IRSKYNNYAT

SEQ ID NO: 6260 - protein, 16 aa, synthetic construct
  REGION 1..16: note = gresonitamab heavy chain 2 CDR3
VRHGNFGNSYISYWAY

SEQ ID NO: 6261 - protein, 109 aa, synthetic construct
  REGION 1..109: note = gresonitamab light chain 2 V region
QTVVTQEPSLTVSPGGTVTLTCGSSTGAVTSGNYPNWVQQKPGQAPRGLIGGTKFLAPGTPARFSGSLLGGKAALTLSGVQPEDEAEYYCVLWYSNRWVFGGGTKLTVL

SEQ ID NO: 6262 - protein, 9 aa, synthetic construct
  REGION 1..9: note = gresonitamab light chain 2 CDR1
TGAVTSGNY

SEQ ID NO: 6263 - skipped

SEQ ID NO: 6264 - protein, 9 aa, synthetic construct
  REGION 1..9: note = gresonitamab light chain 2 CDR3
VLWYSNRWV

SEQ ID NO: 6265 - protein, 117 aa, synthetic construct
  REGION 1..117: note = guselkumab heavy chain V region
EVQLVQSGAEVKKPGESLKISCKGSGYSFSNYWIGWVRQMPGKGLEWMGIIDPSNSYTRYSPSFQGQVTISADKSISTAYLQWSSLKASDTAMYYCARWYYKPFDVWGQGTLVTVSS

SEQ ID NO: 6266 - protein, 7 aa, synthetic construct
  REGION 1..7: note = guselkumab heavy chain CDR1
GYSFSNY

SEQ ID NO: 6267 - protein, 8 aa, synthetic construct
  REGION 1..8: note = guselkumab heavy chain CDR2
IDPSNSYT

SEQ ID NO: 6268 - protein, 10 aa, synthetic construct
  REGION 1..10: note = guselkumab heavy chain CDR3
ARWYYKPFDV

SEQ ID NO: 6269 - protein, 111 aa, synthetic construct
  REGION 1..111: note = guselkumab light chain V region
QSVLTQPPSVSGAPGQRVTISCTGSSSNIGSGYDVHWYQQLPGTAPKLLIYGNSKRPSGVPDRFSGSKSGTSASLAITGLQSEDEADYYCASWTDGLSLVVFGGGTKLTVL

SEQ ID NO: 6270 - protein, 9 aa, synthetic construct
  REGION 1..9: note = guselkumab light chain CDR1
SSNIGSGYD

SEQ ID NO: 6271 - skipped

SEQ ID NO: 6272 - protein, 11 aa, synthetic construct
  REGION 1..11: note = guselkumab light chain CDR3
ASWTDGLSLVV

SEQ ID NO: 6273 - protein, 124 aa, synthetic construct
  REGION 1..124: note = ianalumab heavy chain V region
QVQLQQSGPGLVKPSQTLSLTCAISGDSVSSNSAAWGWIRQSPGRGLEWLGRIYYRSKWYNSYAVSVKSRITINPDTSKNQFSLQLNSVTPEDTAVYYCARYQWVPKIGVFDSWGQGTLVTVSS

SEQ ID NO: 6274 - protein, 10 aa, synthetic construct
  REGION 1..10: note = ianalumab heavy chain CDR1
GDSVSSNSAA

SEQ ID NO: 6275 - protein, 10 aa, synthetic construct
  REGION 1..10: note = ianalumab heavy chain CDR2
IYYRSKWYNS

SEQ ID NO: 6276 - protein, 14 aa, synthetic construct
  REGION 1..14: note = ianalumab heavy chain CDR3
ARYQWVPKIGVFDS

SEQ ID NO: 6277 - protein, 108 aa, synthetic construct
  REGION 1..108: note = ianalumab light chain V region
DIVLTQSPATLSLSPGERATLSCRASQFILPEYLSWYQQKPGQAPRLLIYGSSSRATGVPARFSGSGSGTDFTLTISSLEPEDFAVYYCQQFYSSPLTFGQGTKVEIK

SEQ ID NO: 6278 - protein, 7 aa, synthetic construct
  REGION 1..7: note = ianalumab light chain CDR1
QFILPEY

SEQ ID NO: 6279 - skipped

SEQ ID NO: 6280 - protein, 9 aa, synthetic construct
  REGION 1..9: note = ianalumab light chain CDR3
QQFYSSPLT

SEQ ID NO: 6281 - protein, 116 aa, synthetic construct [sequence omitted]

SEQ ID NO: 6282 - protein, 8 aa, synthetic construct
  REGION 1..8: note = ibalizumab heavy chain CDR1
GYTITDSN

SEQ ID NO: 6283 - protein, 8 aa, synthetic construct
  REGION 1..8: note = ibalizumab heavy chain CDR2
IYPYNGGT

SEQ ID NO: 6284 - protein, 9 aa, synthetic construct
  REGION 1..9: note = ibalizumab heavy chain CDR3
VNGNPWLAY

SEQ ID NO: 6285 - protein, 111 aa, synthetic construct [sequence omitted]

SEQ ID NO: 6286 - protein, 10 aa, synthetic construct
  REGION 1..10: note = ibalizumab light chain CDR1
ESLDNYGIRF

SEQ ID NO: 6287 - skipped

SEQ ID NO: 6288 - protein, 8 aa, synthetic construct
  REGION 1..8: note = ibalizumab light chain CDR3
QQTKEVPW

SEQ ID NO: 6289 - protein, 122 aa, synthetic construct
  REGION 1..122: note = ibritumomab tiuxetan heavy chain V region
QVQLQQSGPEVVKPGASVKMSCKASGYTFTSYVIHWVRQKPGQGLDWIGYINPYNDGTDYDEKFKGKATLTSDTSTSTAYMELSSLRSEDTAVYYCAREKDNYATGAWFAYWGQGTLVTVSS

SEQ ID NO: 6290 - protein, 8 aa, synthetic construct
  REGION 1..8: note = ibritumomab tiuxetan heavy chain CDR1
GYTFTSYV

SEQ ID NO: 6291 - protein, 8 aa, synthetic construct
  REGION 1..8: note = ibritumomab tiuxetan heavy chain CDR2
INPYNDGT

SEQ ID NO: 6292 - protein, 15 aa, synthetic construct
  REGION 1..15: note = ibritumomab tiuxetan heavy chain CDR3
AREKDNYATGAWFAY

SEQ ID NO: 6293 - protein, 112 aa, synthetic construct
  REGION 1..112: note = ibritumomab tiuxetan light chain V region
DIVMTQSPDSLAVSLGERVTMNCKSSQSLLYSTNQKNYLAWYQQKPGQSPKLLIYWASTRESGVPDRFSGSGSGTDFTLTISSVQAEDVAVYYCQQYYSYRTFGGGTKLEIK

SEQ ID NO: 6294 - protein, 12 aa, synthetic construct
  REGION 1..12: note = ibritumomab tiuxetan light chain CDR1
QSLLYSTNQKNY

SEQ ID NO: 6295 - skipped

SEQ ID NO: 6296 - protein, 8 aa, synthetic construct
  REGION 1..8: note = ibritumomab tiuxetan light chain CDR3
QQYYSYRT

SEQ ID NO: 6297 - protein, 126 aa, synthetic construct
  REGION 1..126: note = icrucumab heavy chain V region
QAQVVESGGGVVQSGRSLRLSCAASGFAFSSYGMHWVRQAPGKGLEWVAVIWYDGSNKYYADSVRGRFTISRDNSENTLYLQMNSLRAEDTAVYYCARDHYGSGVHHYFYYGLDVWGQGTTVTVSS

SEQ ID NO: 6298 - protein, 7 aa, synthetic construct
  REGION 1..7: note = icrucumab heavy chain CDR1
GFAFSSY

SEQ ID NO: 6299 - protein, 8 aa, synthetic construct
  REGION 1..8: note = icrucumab heavy chain CDR2
IWYDGSNK

SEQ ID NO: 6300 - protein, 19 aa, synthetic construct
  REGION 1..19: note = icrucumab heavy chain CDR3
ARDHYGSGVHHYFYYGLDV

SEQ ID NO: 6301 - protein, 108 aa, synthetic construct
  REGION 1..108: note = icrucumab light chain V region
EIVLTQSPGTLSLSPGERATLSCRASQSVSSSYLAWYQQKPGQAPRLLIYGASSRATGIPDRFSGSGSGTDFTLTISRLEPEDFAVYYCQQYGSSPLTFGGGTKVEIK

SEQ ID NO: 6302 - protein, 7 aa, synthetic construct
  REGION 1..7: note = icrucumab light chain CDR1
QSVSSSY

SEQ ID NO: 6303 - skipped

SEQ ID NO: 6304 - protein, 9 aa, synthetic construct
  REGION 1..9: note = icrucumab light chain CDR3
QQYGSSPLT

SEQ ID NO: 6305 - protein, 121 aa, synthetic construct
  REGION 1..121: note = idactamab heavy chain V region
QVQLQQWGAGLLKPSETLSLTCAVYGGSFSGYYWSWIRQPPGKGLEWIGEIHHSGGANYNPSLKSRVTISVDTSKNQFSLKLSSVTAADTAVYYCARGQGKNWHYDYFDYWGQGTLVTVSS

SEQ ID NO: 6306 - protein, 8 aa, synthetic construct
  REGION 1..8: note = idactamab heavy chain CDR1
GGSFSGYY

SEQ ID NO: 6307 - protein, 7 aa, synthetic construct
  REGION 1..7: note = idactamab heavy chain CDR2
IHHSGGA

SEQ ID NO: 6308 - protein, 15 aa, synthetic construct
  REGION 1..15: note = idactamab heavy chain CDR3
ARGQGKNWHYDYFDY

SEQ ID NO: 6309 - protein, 107 aa, synthetic construct
  REGION 1..107: note = idactamab light chain V region
DIQMTQSPSTLSASVGDRVTITCRASQSIRSWLAWYQQKPGKAPKLLIYKASILKIGVPSRFSGSGSGTEFTLTISSLQPDDFATYYCQQYYSYSRTFGQGTKVEIK

SEQ ID NO: 6310 - protein, 6 aa, synthetic construct
  REGION 1..6: note = idactamab light chain CDR1
QSIRSW

SEQ ID NO: 6311 - skipped

SEQ ID NO: 6312 - protein, 10 aa, synthetic construct
  REGION 1..10: note = idactamab light chain CDR3
QQYYSYSRTF

SEQ ID NO: 6313 - protein, 118 aa, synthetic construct
  REGION 1..118: note = ifabotuzumab heavy chain V region
QVQLVQSGAEVKKPGASVKVSCKASGYTFTGYWMNWVRQAPGQGLEWMGDIYPGSGNTNYDEKFQGRVTMTRDTSISTAYMELSRLRSDDTAVYYCARGGYYEDFDSWGQGTTVTVSS

SEQ ID NO: 6314 - protein, 8 aa, synthetic construct
  REGION 1..8: note = ifabotuzumab heavy chain CDR1
GYTFTGYW

SEQ ID NO: 6315 - protein, 8 aa, synthetic construct
  REGION 1..8: note = ifabotuzumab heavy chain CDR2
IYPGSGNT

SEQ ID NO: 6316 - protein, 11 aa, synthetic construct
  REGION 1..11: note = ifabotuzumab heavy chain CDR3
ARGGYYEDFDS

SEQ ID NO: 6317 - protein, 107 aa, synthetic construct
  REGION 1..107: note = ifabotuzumab light chain V region
DIQMTQSPSFLSASVGDRVTITCRASQGIISYLAWYQQKPEKAPKRLIYAASSLQSGVPSRFSGSGSGTEFTLTISSLQPEDFATYYCGQYANYPYTFGQGTKLEIK

SEQ ID NO: 6318 - protein, 6 aa, synthetic construct
  REGION 1..6: note = ifabotuzumab light chain CDR1
QGIISY

SEQ ID NO: 6319 - skipped

SEQ ID NO: 6320 - protein, 9 aa, synthetic construct
  REGION 1..9: note = ifabotuzumab light chain CDR3
GQYANYPYT

SEQ ID NO: 6321 - protein, 118 aa, synthetic construct
  REGION 1..118: note = imalumab heavy chain V region
EVQLLESGGGLVQPGGSLRLSCAASGFTFSIYSMNWVRQAPGKGLEWVSSIGSSGGTTYYADSVKGRFTISRDNSKNTLYLQMNSLRAEDTAVYYCAGSQWLYGMDVWGQGTTVTVSS

SEQ ID NO: 6322 - protein, 8 aa, synthetic construct
  REGION 1..8: note = imalumab heavy chain CDR1
GFTFSIYS

SEQ ID NO: 6323 - protein, 8 aa, synthetic construct
  REGION 1..8: note = imalumab heavy chain CDR2
IGSSGGTT

SEQ ID NO: 6324 - protein, 11 aa, synthetic construct
  REGION 1..11: note = imalumab heavy chain CDR3
AGSQWLYGMDV

SEQ ID NO: 6325 - protein, 107 aa, synthetic construct
  REGION 1..107: note = imalumab light chain V region
DIQMTQSPSSLSASVGDRVTITCRSSQRIMTYLNWYQQKPGKAPKLLIFVASHSQSGVPSRFRGSGSETDFTLTISGLQPEDSATYYCQQSFWTPLTFGGGTKVEIK

SEQ ID NO: 6326 - protein, 6 aa, synthetic construct
  REGION 1..6: note = imalumab light chain CDR1
QRIMTY

SEQ ID NO: 6327 - skipped

SEQ ID NO: 6328 - protein, 9 aa, synthetic construct
  REGION 1..9: note = imalumab light chain CDR3
QQSFWTPLT

SEQ ID NO: 6329 - protein, 120 aa, synthetic construct; identical to SEQ ID NO: 422
  REGION 1..120: note = imdevimab heavy chain V region

SEQ ID NO: 6330 - protein, 7 aa, synthetic construct
  REGION 1..7: note = imdevimab heavy chain CDR1
GFTFSNY

SEQ ID NO: 6331 - protein, 8 aa, synthetic construct
  REGION 1..8: note = imdevimab heavy chain CDR2
ISYDGSNK

SEQ ID NO: 6332 - protein, 12 aa, synthetic construct
  REGION 1..12: note = imdevimab heavy chain CDR3
SGSDYGDYLLVY

SEQ ID NO: 6333 - protein, 110 aa, synthetic construct; identical to SEQ ID NO: 421
  REGION 1..110: note = imdevimab light chain V region

SEQ ID NO: 6334 - protein, 9 aa, synthetic construct
  REGION 1..9: note = imdevimab light chain CDR1
SSDVGGYNY

SEQ ID NO: 6335 - skipped

SEQ ID NO: 6336 - protein, 10 aa, synthetic construct
  REGION 1..10: note = imdevimab light chain CDR3
NSLTSISTWV

SEQ ID NO: 6337 - protein, 124 aa, synthetic construct
  REGION 1..124: note = inclacumab heavy chain V region
EVQLVESGGGLVRPGGSLRLSCAASGFTFSNYDMHWVRQATGKGLEWVSAITAAGDIYYPGSVKGRFTISRENAKNSLYLQMNSLRAGDTAVYYCARGRYSGSGSYYNDWFDPWGQGTLVTVSS

SEQ ID NO: 6338 - protein, 7 aa, synthetic construct
  REGION 1..7: note = inclacumab heavy chain CDR1
GFTFSNY

SEQ ID NO: 6339 - protein, 7 aa, synthetic construct
  REGION 1..7: note = inclacumab heavy chain CDR2
ITAAGDI

SEQ ID NO: 6340 - protein, 18 aa, synthetic construct
  REGION 1..18: note = inclacumab heavy chain CDR3
ARGRYSGSGSYYNDWFDP

SEQ ID NO: 6341 - protein, 107 aa, synthetic construct
  REGION 1..107: note = inclacumab light chain V region
EIVLTQSPATLSLSPGERATLSCRASQSVSSYLAWYQQKPGQAPRLLIYDASNRATGIPARFSGSGSGTDFTLTISSLEPEDFAVYYCQQRSNWPLTFGGGTKVEIK

SEQ ID NO: 6342 - protein, 6 aa, synthetic construct
  REGION 1..6: note = inclacumab light chain CDR1
QSVSSY

SEQ ID NO: 6343 - skipped

SEQ ID NO: 6344 - protein, 9 aa, synthetic construct
  REGION 1..9: note = inclacumab light chain CDR3
QQRSNWPLT

SEQ ID NO: 6345 - protein, 119 aa, synthetic construct
  REGION 1..119: note = indusatumab heavy chain V region
QVQLQQWGAGLLKPSETLSLTCAVFGGSFSGYYWSWIRQPPGKGLEWIGEINHRGNTNDNPSLKSRVTISVDTSKNQFALKLSSVTAADTAVYYCARERGYTYGNFDHWGQGTLVTVSS

SEQ ID NO: 6346 - protein, 8 aa, synthetic construct
  REGION 1..8: note = indusatumab heavy chain CDR1
GGSFSGYY

SEQ ID NO: 6347 - protein, 7 aa, synthetic construct
  REGION 1..7: note = indusatumab heavy chain CDR2
INHRGNT

SEQ ID NO: 6348 - protein, 13 aa, synthetic construct
  REGION 1..13: note = indusatumab heavy chain CDR3
ARERGYTYGNFDH

SEQ ID NO: 6349 - protein, 107 aa, synthetic construct
  REGION 1..107: note = indusatumab light chain V region
EIVMTQSPATLSVSPGERATLSCRASQSVSRNLAWYQQKPGQAPRLLIYGASTRATGIPARFSGSGSGTEFTLTIGSLQSEDFAVYYCQQYKTWPRTFGQGTNVEIK

SEQ ID NO: 6350 - protein, 6 aa, synthetic construct
  REGION 1..6: note = indusatumab light chain CDR1
QSVSRN

SEQ ID NO: 6351 - skipped

SEQ ID NO: 6352 - protein, 9 aa, synthetic construct
  REGION 1..9: note = indusatumab light chain CDR3
QQYKTWPRT

SEQ ID NO: 6353 - protein, 119 aa, synthetic construct; identical to SEQ ID NO: 6345
  REGION 1..119: note = indusatumab vedotin heavy chain V region

SEQ ID NO: 6354 - protein, 8 aa, synthetic construct
  REGION 1..8: note = indusatumab vedotin heavy chain CDR1
GGSFSGYY

SEQ ID NO: 6355 - protein, 7 aa, synthetic construct
  REGION 1..7: note = indusatumab vedotin heavy chain CDR2
INHRGNT

SEQ ID NO: 6356 - protein, 13 aa, synthetic construct
  REGION 1..13: note = indusatumab vedotin heavy chain CDR3
ARERGYTYGNFDH

SEQ ID NO: 6357 - protein, 107 aa, synthetic construct; identical to SEQ ID NO: 6349
  REGION 1..107: note = indusatumab vedotin light chain V region

SEQ ID NO: 6358 - protein, 6 aa, synthetic construct
  REGION 1..6: note = indusatumab vedotin light chain CDR1
QSVSRN

SEQ ID NO: 6359 - skipped

SEQ ID NO: 6360 - protein, 9 aa, synthetic construct
  REGION 1..9: note = indusatumab vedotin light chain CDR3
QQYKTWPRT

SEQ ID NO: 6361 - protein, 121 aa, synthetic construct
  REGION 1..121: note = inebilizumab heavy chain V region
EVQLVESGGGLVQPGGSLRLSCAASGFTFSSSWMNWVRQAPGKGLEWVGRIYPGDGDTNYNVKFKGRFTISRDDSKNSLYLQMNSLKTEDTAVYYCARSGFITTVRDFDYWGQGTLVTVSS

SEQ ID NO: 6362 - protein, 8 aa, synthetic construct
  REGION 1..8: note = inebilizumab heavy chain CDR1
GFTFSSSW

SEQ ID NO: 6363 - protein, 8 aa, synthetic construct
  REGION 1..8: note = inebilizumab heavy chain CDR2
IYPGDGDT

SEQ ID NO: 6364 - protein, 14 aa, synthetic construct
  REGION 1..14: note = inebilizumab heavy chain CDR3
ARSGFITTVRDFDY

SEQ ID NO: 6365 - protein, 111 aa, synthetic construct
  REGION 1..111: note = inebilizumab light chain V region
EIVLTQSPDFQSVTPKEKVTITCRASESVDTFGISFMNWFQQKPDQSPKLLIHEASNQGSGVPSRFSGSGSGTDFTLTINSLEAEDAATYYCQQSKEVPFTFGGGTKVEIK

SEQ ID NO: 6366 - protein, 10 aa, synthetic construct
  REGION 1..10: note = inebilizumab light chain CDR1
ESVDTFGISF

SEQ ID NO: 6367 - skipped

SEQ ID NO: 6368 - protein, 10 aa, synthetic construct
  REGION 1..10: note = inebilizumab light chain CDR3
QQSKEVPFTF

SEQ ID NO: 6369 - protein, 119 aa, synthetic construct
  REGION 1..119: note = infliximab heavy chain V region
EVKLEESGGGLVQPGGSMKLSCVASGFIFSNHWMNWVRQSPEKGLEWVAEIRSKSINSATHYAESVKGRFTISRDDSKSAVYLQMTDLRTEDTGVYYCSRNYYGSTYDYWGQGTTLTVS

SEQ ID NO: 6370 - protein, 7 aa, synthetic construct
  REGION 1..7: note = infliximab heavy chain CDR1
GFIFSNH

SEQ ID NO: 6371 - protein, 10 aa, synthetic construct
  REGION 1..10: note = infliximab heavy chain CDR2
IRSKSINSAT

SEQ ID NO: 6372 - protein, 11 aa, synthetic construct
  REGION 1..11: note = infliximab heavy chain CDR3
SRNYYGSTYDY

SEQ ID NO: 6373 - protein, 107 aa, synthetic construct
  REGION 1..107: note = infliximab light chain V region
DILLTQSPAILSVSPGERVSFSCRASQFVGSSIHWYQQRTNGSPRLLIKYASESMSGIPSRFSGSGSGTDFTLSINTVESEDIADYYCQQSHSWPFTFGSGTNLEVK

SEQ ID NO: 6374 - protein, 6 aa, synthetic construct
  REGION 1..6: note = infliximab light chain CDR1
QFVGSS

SEQ ID NO: 6375 - skipped

SEQ ID NO: 6376 - protein, 9 aa, synthetic construct
  REGION 1..9: note = infliximab light chain CDR3
QQSHSWPFT

SEQ ID NO: 6377 - protein, 119 aa, synthetic construct
  REGION 1..119: note = intetumumab heavy chain V region
QVQLVESGGGVVQPGRSRRLSCAASGFTFSRYTMHWVRQAPGKGLEWVAVISFDGSNKYYVDSVKGRFTISRDNSENTLYLQVNILRAEDTAVYYCAREARGSYAFDIWGQGTMVTVSS

SEQ ID NO: 6378 - protein, 8 aa, synthetic construct
  REGION 1..8: note = intetumumab heavy chain CDR1
GFTFSRYT

SEQ ID NO: 6379 - protein, 8 aa, synthetic construct
  REGION 1..8: note = intetumumab heavy chain CDR2
ISFDGSNK

SEQ ID NO: 6380 - protein, 12 aa, synthetic construct
  REGION 1..12: note = intetumumab heavy chain CDR3
AREARGSYAFDI

SEQ ID NO: 6381 - protein, 108 aa, synthetic construct
  REGION 1..108: note = intetumumab light chain V region
EIVLTQSPATLSLSPGERATLSCRASQSVSSYLAWYQQKPGQAPRLLIYDASNRATGIPARFSGSGSGTDFTLTISSLEPEDFAVYYCQQRSNWPPFTFGPGTKVDIK

SEQ ID NO: 6382 - protein, 6 aa, synthetic construct
  REGION 1..6: note = intetumumab light chain CDR1
QSVSSY

SEQ ID NO: 6383 - skipped

SEQ ID NO: 6384 - protein, 10 aa, synthetic construct
  REGION 1..10: note = intetumumab light chain CDR3
QQRSNWPPFT

SEQ ID NO: 6385 - protein, 118 aa, synthetic construct
  REGION 1..118: note = ipilimumab heavy chain V region
QVQLVESGGGVVQPGRSLRLSCAASGFTFSSYTMHWVRQAPGKGLEWVTFISYDGNNKYYADSVKGRFTISRDNSKNTLYLQMNSLRAEDTAIYYCARTGWLGPFDYWGQGTLVTVSS

SEQ ID NO: 6386 - protein, 7 aa, synthetic construct
  REGION 1..7: note = ipilimumab heavy chain CDR1
GFTFSSY

SEQ ID NO: 6387 - protein, 8 aa, synthetic construct
  REGION 1..8: note = ipilimumab heavy chain CDR2
ISYDGNNK

SEQ ID NO: 6388 - protein, 11 aa, synthetic construct
  REGION 1..11: note = ipilimumab heavy chain CDR3
ARTGWLGPFDY

SEQ ID NO: 6389 - protein, 108 aa, synthetic construct
  REGION 1..108: note = ipilimumab light chain V region
EIVLTQSPGTLSLSPGERATLSCRASQSVGSSYLAWYQQKPGQAPRLLIYGAFSRATGIPDRFSGSGSGTDFTLTISRLEPEDFAVYYCQQYGSSPWTFGQGTKVEIK

SEQ ID NO: 6390 - protein, 7 aa, synthetic construct
  REGION 1..7: note = ipilimumab light chain CDR1
QSVGSSY

SEQ ID NO: 6391 - skipped

SEQ ID NO: 6392 - protein, 9 aa, synthetic construct
  REGION 1..9: note = ipilimumab light chain CDR3
QQYGSSPWT

SEQ ID NO: 6393 - protein, 112 aa, synthetic construct
  REGION 1..112: note = iratumumab heavy chain V region
QVQLQQWGAGLLKPSETLSLTCAVYGGSFSAYYWSWIRQPPGKGLEWIGDINHGGGTNYNPSLKSRVTISVDTSKNQFSLKLNSVTAADTAVYYCASLTAYWGQGSLVTVSS

SEQ ID NO: 6394 - protein, 8 aa, synthetic construct
  REGION 1..8: note = iratumumab heavy chain CDR1
GGSFSAYY

SEQ ID NO: 6395 - protein, 10 aa, synthetic construct
  REGION 1..10: note = iratumumab heavy chain CDR2
IGDINHGGGT

SEQ ID NO: 6396 - protein, 6 aa, synthetic construct
  REGION 1..6: note = iratumumab heavy chain CDR3
ASLTAY

SEQ ID NO: 6397 - protein, 107 aa, synthetic construct
  REGION 1..107: note = iratumumab light chain V region
DIQMTQSPTSLSASVGDRVTITCRASQGISSWLTWYQQKPEKAPKSLIYAASSLQSGVPSRFSGSGSGTDFTLTISSLQPEDFATYYCQQYDSYPITFGQGTRLEIK

SEQ ID NO: 6398 - protein, 6 aa, synthetic construct
  REGION 1..6: note = iratumumab light chain CDR1
QGISSW

SEQ ID NO: 6399 - skipped

SEQ ID NO: 6400 - protein, 9 aa, synthetic construct
  REGION 1..9: note = iratumumab light chain CDR3
QQYDSYPIT

SEQ ID NO: 6401 - protein, 120 aa, synthetic construct [sequence omitted]

SEQ ID NO: 6402 - protein, 8 aa, synthetic construct
  REGION 1..8: note = isatuximab heavy chain CDR1
GYTFTDYW

SEQ ID NO: 6403 - protein, 8 aa, synthetic construct
  REGION 1..8: note = isatuximab heavy chain CDR2
IYPGDGDT

SEQ ID NO: 6404 - protein, 13 aa, synthetic construct
  REGION 1..13: note = isatuximab heavy chain CDR3
ARGDYYGSNSLDY

SEQ ID NO: 6405 - protein, 107 aa, synthetic construct [sequence omitted]

SEQ ID NO: 6406 - protein, 6 aa, synthetic construct
  REGION 1..6: note = isatuximab light chain CDR1
QDVSTV

SEQ ID NO: 6407 - skipped

SEQ ID NO: 6408 - protein, 9 aa, synthetic construct
  REGION 1..9: note = isatuximab light chain CDR3
QQHYSPPYT

SEQ ID NO: 6409 - protein, 120 aa, synthetic construct
  REGION 1..120: note = iscalimab heavy chain V region
QVQLVESGGGVVQPGRSLRLSCAASGFTFSSYGMHWVRQAPGKGLEWVAVISYEESNRYHADSVKGRFTISRDNSKITLYLQMNSLRTEDTAVYYCARDGGIAAPGPDYWGQGTLVTVSS

SEQ ID NO: 6410 - protein, 7 aa, synthetic construct
  REGION 1..7: note = iscalimab heavy chain CDR1
GFTFSSY

SEQ ID NO: 6411 - protein, 8 aa, synthetic construct
  REGION 1..8: note = iscalimab heavy chain CDR2
ISYEESNR

SEQ ID NO: 6412 - protein, 13 aa, synthetic construct
  REGION 1..13: note = iscalimab heavy chain CDR3
ARDGGIAAPGPDY

SEQ ID NO: 6413 - protein, 112 aa, synthetic construct
  REGION 1..112: note = iscalimab light chain V region
DIVMTQSPLSLTVTPGEPASISCRSSQSLLYSNGYNYLDWYLQKPGQSPQVLISLGSNRASGVPDRFSGSGSGTDFTLKISRVEAEDVGVYYCMQARQTPFTFGPGTKVDIR

SEQ ID NO: 6414 - protein, 11 aa, synthetic construct
  REGION 1..11: note = iscalimab light chain CDR1
QSLLYSNGYNY

SEQ ID NO: 6415 - skipped

SEQ ID NO: 6416 - protein, 9 aa, synthetic construct
  REGION 1..9: note = iscalimab light chain CDR3
MQARQTPFT

SEQ ID NO: 6417 - protein, 122 aa, synthetic construct
  REGION 1..122: note = itepekimab heavy chain V region
EVQLVESGGNLEQPGGSLRLSCTASGFTFSRSAMNWVRRAPGKGLEWVSGISGSGGRTYYADSVKGRFTISRDNSKNTLYLQMNSLSAEDTAAYYCAKDSYTTSWYGGMDVWGHGTTVTVSS

SEQ ID NO: 6418 - protein, 8 aa, synthetic construct
  REGION 1..8: note = itepekimab heavy chain CDR1
GFTFSRSA

SEQ ID NO: 6419 - protein, 8 aa, synthetic construct
  REGION 1..8: note = itepekimab heavy chain CDR2
ISGSGGRT

SEQ ID NO: 6420 - protein, 15 aa, synthetic construct
  REGION 1..15: note = itepekimab heavy chain CDR3
AKDSYTTSWYGGMDV

SEQ ID NO: 6421 - protein, 107 aa, synthetic construct
  REGION 1..107: note = itepekimab light chain V region
DIQMTQSPSSVSASVGDRVTITCRASQGIFSWLAWYQQKPGKAPKLLIYAASSLQSGVPSRFSGSGSGTDFTLTISSLQPEDFAIYYCQQANSVPITFGQGTRLEIK

SEQ ID NO: 6422 - protein, 6 aa, synthetic construct
  REGION 1..6: note = itepekimab light chain CDR1
QGIFSW

SEQ ID NO: 6423 - skipped

SEQ ID NO: 6424 - protein, 9 aa, synthetic construct
  REGION 1..9: note = itepekimab light chain CDR3
QQANSVPIT

SEQ ID NO: 6425 - protein, 119 aa, synthetic construct
  REGION 1..119: note = itolizumab heavy chain V region
EVQLVESGGGLVKPGGSLKLSCAASGFKFSRYAMSWVRQAPGKRLEWVATISSGGSYIYYPDSVKGRFTISRDNVKNTLYLQMSSLRSEDTAMYYCARRDYDLDYFDSWGQGTLVTVSS

SEQ ID NO: 6426 - protein, 8 aa, synthetic construct
  REGION 1..8: note = itolizumab heavy chain CDR1
GFKFSRYA

SEQ ID NO: 6427 - protein, 7 aa, synthetic construct
  REGION 1..7: note = itolizumab heavy chain CDR2
ISSGGSY

SEQ ID NO: 6428 - protein, 12 aa, synthetic construct
  REGION 1..12: note = itolizumab heavy chain CDR3
ARRDYDLDYFDS

SEQ ID NO: 6429 - protein, 107 aa, synthetic construct
  REGION 1..107: note = itolizumab light chain V region
DIQMTQSPSSLSASVGDRVTITCKASRDIRSYLTWYQQKPGKAPKTLIYYATSLADGVPSRFSGSGSGQDYSLTISSLESDDTATYYCLQHGESPFTLGSGTKLEIK

SEQ ID NO: 6430 - protein, 7 aa, synthetic construct
  REGION 1..7: note = itolizumab light chain CDR1
RDIRSYL

SEQ ID NO: 6431 - skipped

SEQ ID NO: 6432 - protein, 13 aa, synthetic construct
  REGION 1..13: note = itolizumab light chain CDR3
LQHGESPFTLGSG

SEQ ID NO: 6433 - protein, 118 aa, synthetic construct
  REGION 1..118: note = ivuxolimab heavy chain V region
EVQLVESGGGLVQPGGSLRLSCAASGFTFSSYSMNWVRQAPGKGLEWVSYISSSSSTIDYADSVKGRFTISRDNAKNSLYLQMNSLRDEDTAVYYCARESGWYLFDYWGQGTLVTVSS

SEQ ID NO: 6434 - protein, 8 aa, synthetic construct
  REGION 1..8: note = ivuxolimab heavy chain CDR1
GFTFSSYS

SEQ ID NO: 6435 - protein, 8 aa, synthetic construct
  REGION 1..8: note = ivuxolimab heavy chain CDR2
ISSSSSTI

SEQ ID NO: 6436 - protein, 11 aa, synthetic construct
  REGION 1..11: note = ivuxolimab heavy chain CDR3
ARESGWYLFDY

SEQ ID NO: 6437 - protein, 107 aa, synthetic construct
  REGION 1..107: note = ivuxolimab light chain V region
DIQMTQSPSSLSASVGDRVTITCRASQGISSWLAWYQQKPEKAPKSLIYAASSLQSGVPSRFSGSGSGTDFTLTISSLQPEDFATYYCQQYNSYPPTFGGGTKVEIK

SEQ ID NO: 6438 - protein, 6 aa, synthetic construct
  REGION 1..6: note = ivuxolimab light chain CDR1
QGISSW

SEQ ID NO: 6439 - skipped

SEQ ID NO: 6440 - protein, 9 aa, synthetic construct
  REGION 1..9: note = ivuxolimab light chain CDR3
QQYNSYPPT

SEQ ID NO: 6441 - protein, 119 aa, synthetic construct
  REGION 1..119: note = ixekizumab heavy chain V region
QVQLVQSGAEVKKPGSSVKVSCKASGYSFTDYHIHWVRQAPGQGLEWMGVINPMYGTTDYNQRFKGRVTITADESTSTAYMELSSLRSEDTAVYYCARYDYFTGTGVYWGQGTLVTVSS

SEQ ID NO: 6442 - protein, 8 aa, synthetic construct
  REGION 1..8: note = ixekizumab heavy chain CDR1
GYSFTDYH

SEQ ID NO: 6443 - protein, 8 aa, synthetic construct
  REGION 1..8: note = ixekizumab heavy chain CDR2
INPMYGTT

SEQ ID NO: 6444 - protein, 12 aa, synthetic construct
  REGION 1..12: note = ixekizumab heavy chain CDR3
ARYDYFTGTGVY

SEQ ID NO: 6445 - protein, 112 aa, synthetic construct
  REGION 1..112: note = ixekizumab light chain V region
DIVMTQTPLSLSVTPGQPASISCRSSRSLVHSRGNTYLHWYLQKPGQSPQLLIYKVSNRFIGVPDRFSGSGSGTDFTLKISRVEAEDVGVYYCSQSTHLPFTFGQGTKLEIK

SEQ ID NO: 6446 - protein, 11 aa, synthetic construct
  REGION 1..11: note = ixekizumab light chain CDR1
RSLVHSRGNTY

SEQ ID NO: 6447 - skipped

SEQ ID NO: 6448 - protein, 9 aa, synthetic construct
  REGION 1..9: note = ixekizumab light chain CDR3
SQSTHLPFT

SEQ ID NO: 6449 - protein, 122 aa, synthetic construct
  REGION 1..122: note = lanadelumab heavy chain V region
EVQLLESGGGLVQPGGSLRLSCAASGFTFSHYIMMWVRQAPGKGLEWVSGIYSSGGITVYADSVKGRFTISRDNSKNTLYLQMNSLRAEDTAVYYCAYRRIGVPRRDEFDIWGQGTMVTVSS

SEQ ID NO: 6450 - protein, 8 aa, synthetic construct
  REGION 1..8: note = lanadelumab heavy chain CDR1
GFTFSHYI

SEQ ID NO: 6451 - protein, 8 aa, synthetic construct
  REGION 1..8: note = lanadelumab heavy chain CDR2
IYSSGGIT

SEQ ID NO: 6452 - protein, 15 aa, synthetic construct
  REGION 1..15: note = lanadelumab heavy chain CDR3
AYRRIGVPRRDEFDI

SEQ ID NO: 6453 - protein, 106 aa, synthetic construct
  REGION 1..106: note = lanadelumab light chain V region
DIQMTQSPSTLSASVGDRVTITCRASQSISSWLAWYQQKPGKAPKLLIYKASTLESGVPSRFSGSGSGTEFTLTISSLQPDDFATYYCQQYNTYWTFGQGTKVEIK

SEQ ID NO: 6454 - protein, 6 aa, synthetic construct
  REGION 1..6: note = lanadelumab light chain CDR1
QSISSW

SEQ ID NO: 6455 - skipped

SEQ ID NO: 6456 - protein, 8 aa, synthetic construct
  REGION 1..8: note = lanadelumab light chain CDR3
QQYNTYWT

SEQ ID NO: 6457 - protein, 122 aa, synthetic construct
  REGION 1..122: note = latozinemab heavy chain V region
QVQLQESGPGLVKPSETLSLTCAVSGYSISSGYYWGWIRQPPGKGLEWIGTIYHSGSTYYNPSLKSRVTISVDTSKNQFSLKLSSVTAADTAVYYCARQGSIKQGYYGMDVWGQGTTVTVSS

SEQ ID NO: 6458 - protein, 9 aa, synthetic construct
  REGION 1..9: note = latozinemab heavy chain CDR1
GYSISSGYY

SEQ ID NO: 6459 - protein, 7 aa, synthetic construct
  REGION 1..7: note = latozinemab heavy chain CDR2
IYHSGST

SEQ ID NO: 6460 - protein, 15 aa, synthetic construct
  REGION 1..15: note = latozinemab heavy chain CDR3
ARQGSIKQGYYGMDV

SEQ ID NO: 6461 - protein, 112 aa, synthetic construct
  REGION 1..112: note = latozinemab light chain V region
DIVMTQSPLSLPVTPGEPASISCRSSQSLLRSTGYNYLDWYLQKPGQSPQLLIYLGSNRASGVPDRFSGSGSGTDFTLKISRAEAEDVGVYYCMQQQEAPLTFGGGTKVEIK

SEQ ID NO: 6462 - protein, 12 aa, synthetic construct
  REGION 1..12: note = latozinemab light chain CDR1
QSLLRSTGYNYL

SEQ ID NO: 6463 - skipped

SEQ ID NO: 6464 - protein, 9 aa, synthetic construct
  REGION 1..9: note = latozinemab light chain CDR3
MQQQEAPLT

SEQ ID NO: 6465 - protein, 118 aa, synthetic construct
  REGION 1..118: note = lemzoparlimab heavy chain V region
EVQLVESGGGLVKPGGSLRLSCAASGLTFERAWMNWVRQAPGKGLEWVGRIKRKTDGETTDYAAPVKGRFSISRDDSKNTLYLQMNSLKTEDTAVYYCAGSNRAFDIWGQGTMVTVSS

SEQ ID NO: 6466 - protein, 8 aa, synthetic construct
  REGION 1..8: note = lemzoparlimab heavy chain CDR1
GLTFERAW

SEQ ID NO: 6467 - protein, 10 aa, synthetic construct
  REGION 1..10: note = lemzoparlimab heavy chain CDR2
IKRKTDGETT

SEQ ID NO: 6468 - protein, 9 aa, synthetic construct
  REGION 1..9: note = lemzoparlimab heavy chain CDR3
AGSNRAFDI

SEQ ID NO: 6469 - protein, 113 aa, synthetic construct
  REGION 1..113: note = lemzoparlimab light chain V region
DIVMTQSPDSLAVSLGERATINCKSSQSVLYAGNNRNYLAWYQQKPGQPPKLLINQASTRASGVPDRFSGSGSGTEFTLIISSLQAEDVAIYYCQQYYTPPLAFGGGTKLEIK

SEQ ID NO: 6470 - protein, 12 aa, synthetic construct
  REGION 1..12: note = lemzoparlimab light chain CDR1
QSVLYAGNNRNY

SEQ ID NO: 6471 - skipped

SEQ ID NO: 6472 - protein, 9 aa, synthetic construct
  REGION 1..9: note = lemzoparlimab light chain CDR3
QQYYTPPLA

SEQ ID NO: 6473 - protein, 119 aa, synthetic construct [sequence omitted]

SEQ ID NO: 6474 - protein, 9 aa, synthetic construct
  REGION 1..9: note = lenzilumab heavy chain CDR1
GYSFTNYYI

SEQ ID NO: 6475 - protein, 8 aa, synthetic construct
  REGION 1..8: note = lenzilumab heavy chain CDR2
INAGNGNT

SEQ ID NO: 6476 - protein, 12 aa, synthetic construct
  REGION 1..12: note = lenzilumab heavy chain CDR3
VRRQRFPYYFDY

SEQ ID NO: 6477 - protein, 107 aa, synthetic construct [sequence omitted]

SEQ ID NO: 6478 - protein, 6 aa, synthetic construct
  REGION 1..6: note = lenzilumab light chain CDR1
QSVGTN

SEQ ID NO: 6479 - skipped

SEQ ID NO: 6480 - protein, 9 aa, synthetic construct
  REGION 1..9: note = lenzilumab light chain CDR3
QQFNKSPLT

SEQ ID NO: 6481 - protein, 123 aa, synthetic construct
  REGION 1..123: note = lesofavumab heavy chain V region
EVQLVQSGAEVKKPGESLKISCKVSGYSFTSQWIGWVRQMPGKGLEWIGMMYPGESETIYSPSFQGQVTISADNSISTAYLQWSSLKASDTAIYYCASGPGYSGYHYGWFDTWGQGTLVTVSS

SEQ ID NO: 6482 - protein, 8 aa, synthetic construct
  REGION 1..8: note = lesofavumab heavy chain CDR1
GYSFTSQW

SEQ ID NO: 6483 - protein, 8 aa, synthetic construct
  REGION 1..8: note = lesofavumab heavy chain CDR2
MYPGESET

SEQ ID NO: 6484 - protein, 16 aa, synthetic construct
  REGION 1..16: note = lesofavumab heavy chain CDR3
ASGPGYSGYHYGWFDT

SEQ ID NO: 6485 - protein, 112 aa, synthetic construct
  REGION 1..112: note = lesofavumab light chain V region
DIVMTQSPLSLPVTPGEPASISCRSSQSLLRSNGYNYLDWYLQKPGQSPQLLIYLGSNRASGVPDRFSGSGSGTDFTLKISRVEAEDVGVYYCMQALQTPYTFGQGTKLEIK

SEQ ID NO: 6486 - protein, 11 aa, synthetic construct
  REGION 1..11: note = lesofavumab light chain CDR1
QSLLRSNGYNY

SEQ ID NO: 6487 - skipped

SEQ ID NO: 6488 - protein, 9 aa, synthetic construct
  REGION 1..9: note = lesofavumab light chain CDR3
MQALQTPYT

SEQ ID NO: 6489 - protein, 115 aa, synthetic construct
  REGION 1..115: note = letaplimab heavy chain V region
QVQLQESGPGLVKPSETLSLTCTVSGGSISSYYWSWIRQPPGKGLEWIGYIYYSGSTNYNPSLKSRVTISVDTSKNQFSLKLSSVTAADTAVYYCARGKTGSAAWGQGTLVTVSS

SEQ ID NO: 6490 - protein, 8 aa, synthetic construct
  REGION 1..8: note = letaplimab heavy chain CDR1
GGSISSYY

SEQ ID NO: 6491 - protein, 8 aa, synthetic construct
  REGION 1..8: note = letaplimab heavy chain CDR2
IYYSGSTN

SEQ ID NO: 6492 - protein, 9 aa, synthetic construct
  REGION 1..9: note = letaplimab heavy chain CDR3
ARGKTGSAA

SEQ ID NO: 6493 - protein, 107 aa, synthetic construct
  REGION 1..107: note = letaplimab light chain V region
DIQMTQSPSSVSASVGDRVTITCRASQGISRWLAWYQQKPGKAPKLLIYAASSLQSGVPSRFSGSGSGTDFTLTISSLQPEDFATYYCQQTVSFPITFGGGTKVEIK

SEQ ID NO: 6494 - protein, 6 aa, synthetic construct
  REGION 1..6: note = letaplimab light chain CDR1
QGISRW

SEQ ID NO: 6495 - skipped

SEQ ID NO: 6496 - protein, 9 aa, synthetic construct
  REGION 1..9: note = letaplimab light chain CDR3
QQTVSFPIT

SEQ ID NO: 6497 - protein, 121 aa, synthetic construct
  REGION 1..121: note = lexatumumab heavy chain V region
EVQLVQSGGGVERPGGSLRLSCAASGFTFDDYGMSWVRQAPGKGLEWVSGINWNGGSTGYADSVKGRVTISRDNAKNSLYLQMNSLRAEDTAVYYCAKILGAGRGWYFDLWGKGTTVTVSS

SEQ ID NO: 6498 - protein, 8 aa, synthetic construct
  REGION 1..8: note = lexatumumab heavy chain CDR1
GFTFDDYG

SEQ ID NO: 6499 - protein, 8 aa, synthetic construct
  REGION 1..8: note = lexatumumab heavy chain CDR2
INWNGGST

SEQ ID NO: 6500 - protein, 14 aa, synthetic construct
  REGION 1..14: note = lexatumumab heavy chain CDR3
AKILGAGRGWYFDL

SEQ ID NO: 6501 - protein, 108 aa, synthetic construct
  REGION 1..108: note = lexatumumab light chain V region
SSELTQDPAVSVALGQTVRITCQGDSLRSYYASWYQQKPGQAPVLVIYGKNNRPSGIPDRFSGSSSGNTASLTITGAQAEDEADYYCNSRDSSGNHVVFGGGTKLTVL

SEQ ID NO: 6502 - protein, 9 aa, synthetic construct
  REGION 1..9: note = lexatumumab light chain CDR1
QGDSLRSYY

SEQ ID NO: 6503 - skipped

SEQ ID NO: 6504 - protein, 11 aa, synthetic construct
  REGION 1..11: note = lexatumumab light chain CDR3
NSRDSSGNHVV

SEQ ID NO: 6505 - protein, 116 aa, synthetic construct
  REGION 1..116: note = lintuzumab satetraxetan heavy chain V region
QVQLVQSGAEVKKPGSSVKVSCKASGYTFTDYNMHWVRQAPGQGLEWIGYIYPYNGGTGYNQKFKSKATITADESTNTAYMELSSLRSEDTAVYYCARGRPAMDYWGQGTLVTVSS

SEQ ID NO: 6506 - protein, 8 aa, synthetic construct
  REGION 1..8: note = lintuzumab satetraxetan heavy chain CDR1
GYTFTDYN

SEQ ID NO: 6507 - protein, 8 aa, synthetic construct
  REGION 1..8: note = lintuzumab satetraxetan heavy chain CDR2
IYPYNGGT

SEQ ID NO: 6508 - protein, 9 aa, synthetic construct
  REGION 1..9: note = lintuzumab satetraxetan heavy chain CDR3
ARGRPAMDY

SEQ ID NO: 6509 - protein, 111 aa, synthetic construct
  REGION 1..111: note = lintuzumab satetraxetan light chain V region
DIQMTQSPSSLSASVGDRVTITCRASESVDNYGISFMNWFQQKPGKAPKLLIYAASNQGSGVPSRFSGSGSGTDFTLTISSLQPDDFATYYCQQSKEVPWTFGQGTKVEIK

SEQ ID NO: 6510 - protein, 10 aa, synthetic construct
  REGION 1..10: note = lintuzumab satetraxetan light chain CDR1
ESVDNYGISF

SEQ ID NO: 6511 - skipped

SEQ ID NO: 6512 - protein, 9 aa, synthetic construct
  REGION 1..9: note = lintuzumab satetraxetan light chain CDR3
QQSKEVPWT

SEQ ID NO: 6513 - protein, 123 aa, synthetic construct
  REGION 1..123: note = lirilumab heavy chain V region
QVQLVQSGAEVKKPGSSVKVSCKASGGTFSFYAISWVRQAPGQGLEWMGGFIPIFGAANYAQKFQGRVTITADESTSTAYMELSSLRSDDTAVYYCARIPSGSYYYDYDMDVWGQGTTVTVSS

SEQ ID NO: 6514 - protein, 8 aa, synthetic construct
  REGION 1..8: note = lirilumab heavy chain CDR1
GGTFSFYA

SEQ ID NO: 6515 - protein, 7 aa, synthetic construct
  REGION 1..7: note = lirilumab heavy chain CDR2
IPIFGAA

SEQ ID NO: 6516 - protein, 16 aa, synthetic construct
  REGION 1..16: note = lirilumab heavy chain CDR3
ARIPSGSYYYDYDMDV

SEQ ID NO: 6517 - protein, 107 aa, synthetic construct
  REGION 1..107: note = lirilumab light chain V region
EIVLTQSPVTLSLSPGERATLSCRASQSVSSYLAWYQQKPGQAPRLLIYDASNRATGIPARFSGSGSGTDFTLTISSLEPEDFAVYYCQQRSNWMYTFGQGTKLEIK

SEQ ID NO: 6518 - protein, 6 aa, synthetic construct
  REGION 1..6: note = lirilumab light chain CDR1
QSVSSY

SEQ ID NO: 6519 - skipped

SEQ ID NO: 6520 - protein, 9 aa, synthetic construct
  REGION 1..9: note = lirilumab light chain CDR3
QQRSNWMYT

SEQ ID NO: 6521 - protein, 123 aa, synthetic construct
  REGION 1..123: note = lodapolimab heavy chain V region
QVQLVQSGAEVKKPGSSVKVSCKASGGTFSSYAISWVRQAPGQGLEWMGGIIPIFGTANYAQKFQGRVTITADKSTSTAYMELSSLRSEDTAVYYCARSPDYSPYYYYGMDVWGQGTTVTVSS

SEQ ID NO: 6522 - protein, 7 aa, synthetic construct
  REGION 1..7: note = lodapolimab heavy chain CDR1
GGTFSSY

SEQ ID NO: 6523 - protein, 8 aa, synthetic construct
  REGION 1..8: note = lodapolimab heavy chain CDR2
IIPIFGTA

SEQ ID NO: 6524 - protein, 16 aa, synthetic construct
  REGION 1..16: note = lodapolimab heavy chain CDR3
ARSPDYSPYYYYGMDV

SEQ ID NO: 6525 - protein, 110 aa, synthetic construct
  REGION 1..110: note = lodapolimab light chain V region
QSVLTQPPSASGTPGQRVTISCSGSSSNIGSNTVNWYQQLPGTAPKLLIYGNSNRPSGVPDRFSGSKSGTSASLAISGLQSEDEADYYCQSYDSSLSGSVFGGGIKLTVL

SEQ ID NO: 6526 - protein, 9 aa, synthetic construct
  REGION 1..9: note = lodapolimab light chain CDR1
SSSNIGSNT

SEQ ID NO: 6527 - skipped

SEQ ID NO: 6528 - protein, 11 aa, synthetic construct
  REGION 1..11: note = lodapolimab light chain CDR3
QSYDSSLSGSV

SEQ ID NO: 6529 - protein, 118 aa, synthetic construct
  REGION 1..118: note = lokivetmab heavy chain V region
EVQLVESGGDLVKPGGSLRLSCVASGFTFSNYGMSWVRQAPGKGLQWVATISYGGSYTYYPDNIKGRFTISRDNAKNTLYLQMNSLRAEDTAMYYCVRGYGYDTMDYWGQGTLVTVSS

SEQ ID NO: 6530 - protein, 8 aa, synthetic construct
  REGION 1..8: note = lokivetmab heavy chain CDR1
GFTFSNYG

SEQ ID NO: 6531 - protein, 8 aa, synthetic construct
  REGION 1..8: note = lokivetmab heavy chain CDR2
ISYGGSYT

SEQ ID NO: 6532 - protein, 11 aa, synthetic construct
  REGION 1..11: note = lokivetmab heavy chain CDR3
VRGYGYDTMDY

SEQ ID NO: 6533 - protein, 111 aa, synthetic construct
  REGION 1..111: note = lokivetmab light chain V region
EIVMTQSPASLSLSQEEKVTITCKASQSVSFAGTGLMHWYQQKPGQAPKLLIYRASNLEAGVPSRFSGSGSGTDFSFTISSLEPEDVAVYYCQQSREYPWTFGQGTKLEIK

SEQ ID NO: 6534 - protein, 8 aa, synthetic construct
  REGION 1..8: note = lokivetmab light chain CDR1
QSVSFAGT

SEQ ID NO: 6535 - skipped

SEQ ID NO: 6536 - protein, 9 aa, synthetic construct
  REGION 1..9: note = lokivetmab light chain CDR3
QQSREYPWT

SEQ ID NO: 6537 - protein, 120 aa, synthetic construct
  REGION 1..120: note = lomtegovimab heavy chain V region
QVQLVESGGGVVQPGRSLRLSCAATGFTFRRYGMHWVRQAPGKGLEWVAGILFDGSNKYYVDSVKGRFTISRDSSRNTLYLQLNSLRREDTAVYYCAKGGDYEWELLESWGQGTLVTVSS

SEQ ID NO: 6538 - protein, 8 aa, synthetic construct
  REGION 1..8: note = lomtegovimab heavy chain CDR1
GFTFRRYG

SEQ ID NO: 6539 - protein, 8 aa, synthetic construct
  REGION 1..8: note = lomtegovimab heavy chain CDR2
ILFDGSNK

SEQ ID NO: 6540 - protein, 13 aa, synthetic construct
  REGION 1..13: note = lomtegovimab heavy chain CDR3
AKGGDYEWELLES

SEQ ID NO: 6541 - protein, 107 aa, synthetic construct
  REGION 1..107: note = lomtegovimab light chain V region
DIQMTQSPSTVSASVGDRVTITCRASQSIDNWLAWYQEKPGKAPKVLIYKASSLESGVPSRFSGRGSGTEFTLTISSLQPGDFATYYCQHYHSFPLTFGGGTKVDIK

SEQ ID NO: 6542 - protein, 6 aa, synthetic construct
  REGION 1..6: note = lomtegovimab light chain CDR1
QSIDNW

SEQ ID NO: 6543 - skipped

SEQ ID NO: 6544 - protein, 9 aa, synthetic construct
  REGION 1..9: note = lomtegovimab light chain CDR3
QHYHSFPLT

SEQ ID NO: 6545 - protein, 120 aa, synthetic construct
  REGION 1..120: note = loncastuximab tesirine heavy chain V region
QVQLVQPGAEVVKPGASVKLSCKTSGYTFTSNWMHWVKQAPGQGLEWIGEIDPSDSYTNYNQNFQGKAKLTVDKSTSTAYMEVSSLRSDDTAVYYCARGSNPYYYAMDYWGQGTSVTVSS

SEQ ID NO: 6546 - protein, 8 aa, synthetic construct
  REGION 1..8: note = loncastuximab tesirine heavy chain CDR1
GYTFTSNW

SEQ ID NO: 6547 - protein, 8 aa, synthetic construct
  REGION 1..8: note = loncastuximab tesirine heavy chain CDR2
IDPSDSYT

SEQ ID NO: 6548 - protein, 13 aa, synthetic construct
  REGION 1..13: note = loncastuximab tesirine heavy chain CDR3
ARGSNPYYYAMDY

SEQ ID NO: 6549 - protein, 109 aa, synthetic construct
  REGION 1..109: note = loncastuximab tesirine light chain V region
EIVLTQSPAIMSASPGERVTMTCSASSGVNYMHWYQQKPGTSPRRWIYDTSKLASGVPARSGVNYFSGSGSGTSYSLTISSMEPEDAATYYCHQRGSYTFGGGTKLEIK

SEQ ID NO: 6550 - protein, 5 aa, synthetic construct
  REGION 1..5: note = loncastuximab tesirine light chain CDR1
SGVNY

SEQ ID NO: 6551 - skipped

SEQ ID NO: 6552 - protein, 7 aa, synthetic construct
  REGION 1..7: note = loncastuximab tesirine light chain CDR3
HQRGSYT

SEQ ID NO: 6553 - protein, 120 aa, synthetic construct; identical to SEQ ID NO: 6409
  REGION 1..120: note = lucatumumab heavy chain V region

SEQ ID NO: 6554 - protein, 7 aa, synthetic construct
  REGION 1..7: note = lucatumumab heavy chain CDR1
GFTFSSY

SEQ ID NO: 6555 - protein, 8 aa, synthetic construct
  REGION 1..8: note = lucatumumab heavy chain CDR2
ISYEESNR

SEQ ID NO: 6556 - protein, 13 aa, synthetic construct
  REGION 1..13: note = lucatumumab heavy chain CDR3
ARDGGIAAPGPDY

SEQ ID NO: 6557 - protein, 112 aa, synthetic construct; identical to SEQ ID NO: 6413
  REGION 1..112: note = lucatumumab light chain V region

SEQ ID NO: 6558 - protein, 11 aa, synthetic construct
  REGION 1..11: note = lucatumumab light chain CDR1
QSLLYSNGYNY

SEQ ID NO: 6559 - skipped

SEQ ID NO: 6560 - protein, 9 aa, synthetic construct
  REGION 1..9: note = lucatumumab light chain CDR3
MQARQTPFT

SEQ ID NO: 6561 - protein, 117 aa, synthetic construct
  REGION 1..117: note = lupartumab heavy chain V region
EVQLLESGGGLVQPGGSLRLSCAASGFTFSNAWMSWVRQAPGKGLEWVSYISSSGSTIYYADSVKGRFTISRDNSKNTLYLQMNSLRAEDTAVYYCAREGLWAFDYWGQGTLVTVSS

SEQ ID NO: 6562 - protein, 8 aa, synthetic construct
  REGION 1..8: note = lupartumab heavy chain CDR1
GFTFSNAW

SEQ ID NO: 6563 - protein, 8 aa, synthetic construct
  REGION 1..8: note = lupartumab heavy chain CDR2
ISSSGSTI

SEQ ID NO: 6564 - protein, 10 aa, synthetic construct
  REGION 1..10: note = lupartumab heavy chain CDR3
AREGLWAFDY

SEQ ID NO: 6565 - protein, 111 aa, synthetic construct
  REGION 1..111: note = lupartumab light chain V region
ESVLTQPPSVSGAPGQRVTISCTGSSSNIGAGYVVHWYQQLPGTAPKLLIYDNNKRPSGVPDRFSGSKSGTSASLAISGLRSEDEADYYCAAWDDRLNGPVFGGGTKLTVL

SEQ ID NO: 6566 - protein, 9 aa, synthetic construct
  REGION 1..9: note = lupartumab light chain CDR1
SSNIGAGYV

SEQ ID NO: 6567 - skipped

SEQ ID NO: 6568 - protein, 11 aa, synthetic construct
  REGION 1..11: note = lupartumab light chain CDR3
AAWDDRLNGPV

SEQ ID NO: 6569 - protein, 117 aa, synthetic construct; identical to SEQ ID NO: 6561
  REGION 1..117: note = lupartumab amadotin heavy chain V region

SEQ ID NO: 6570 - protein, 8 aa, synthetic construct
  REGION 1..8: note = lupartumab amadotin heavy chain CDR1
GFTFSNAW

SEQ ID NO: 6571 - protein, 8 aa, synthetic construct
  REGION 1..8: note = lupartumab amadotin heavy chain CDR2
ISSSGSTI

SEQ ID NO: 6572 - protein, 10 aa, synthetic construct
  REGION 1..10: note = lupartumab amadotin heavy chain CDR3
AREGLWAFDY

SEQ ID NO: 6573 - protein, 111 aa, synthetic construct; identical to SEQ ID NO: 6565
  REGION 1..111: note = lupartumab amadotin light chain V region

SEQ ID NO: 6574 - protein, 9 aa, synthetic construct
  REGION 1..9: note = lupartumab amadotin light chain CDR1
SSNIGAGYV

SEQ ID NO: 6575 - skipped

SEQ ID NO: 6576 - protein, 11 aa, synthetic construct
  REGION 1..11: note = lupartumab amadotin light chain CDR3
AAWDDRLNGPV

SEQ ID NO: 6577 - protein, 118 aa, synthetic construct
  REGION 1..118: note = maftivimab heavy chain V region
EVQLVESGGGLVQPGGSLRLSCAASGFTSSSYAMNWVRQAPGKGLEWVSTISGMGGSTYYADSVKGRFTISRDNSKNTLYLQMNSLRAEDTAVYYCAKRGYPHSFDIWGQGTMVTVSS

SEQ ID NO: 6578 - protein, 7 aa, synthetic construct
  REGION 1..7: note = maftivimab heavy chain CDR1
GFTSSSY

SEQ ID NO: 6579 - protein, 8 aa, synthetic construct
  REGION 1..8: note = maftivimab heavy chain CDR2
ISGMGGST

SEQ ID NO: 6580 - protein, 11 aa, synthetic construct
  REGION 1..11: note = maftivimab heavy chain CDR3
AKRGYPHSFDI

SEQ ID NO: 6581 - protein, 106 aa, synthetic construct
  REGION 1..106: note = maftivimab light chain V region
DIQMTQSPSSLSASVGDRVTITCRASQSISSFLNWYQQKPGKAPKLLIYAASSLQSGVPSRFSGSGSGTDFTLTISSLQPEDFATYYCQQSYSTLTFGQGTRLEIK

SEQ ID NO: 6582 - protein, 6 aa, synthetic construct
  REGION 1..6: note = maftivimab light chain CDR1
QSISSF

SEQ ID NO: 6583 - skipped

SEQ ID NO: 6584 - protein, 8 aa, synthetic construct
  REGION 1..8: note = maftivimab light chain CDR3
QQSYSTLT

SEQ ID NO: 6585 - protein, 122 aa, synthetic construct
  REGION 1..122: note = manelimab heavy chain V region
EVQLVESGGGVVRPGGSLRLSCAASGFTFDDYAMSWVRQAPGKGLEWVSDISWSGSNTNYADSVKGRFTISRDNAKNSLYLQMNSLRAEDTALYHCARAPLLLAMTFGVGSWGQGTLVTVSS

SEQ ID NO: 6586 - protein, 8 aa, synthetic construct
  REGION 1..8: note = manelimab heavy chain CDR1
GFTFDDYA

SEQ ID NO: 6587 - protein, 8 aa, synthetic construct
  REGION 1..8: note = manelimab heavy chain CDR2
ISWSGSNT

SEQ ID NO: 6588 - protein, 15 aa, synthetic construct
  REGION 1..15: note = manelimab heavy chain CDR3
ARAPLLLAMTFGVGS

SEQ ID NO: 6589 - protein, 110 aa, synthetic construct
  REGION 1..110: note = manelimab light chain V region
QTVVTQEPSLSVSPGGTVTLTCGLSSGTVTAINYPGWYQQTPGQAPRTLIYNTNTRHSGVPDRFSGSISGNKAALTITGAQAEDEADYYCALYMGNGGHMFGGGTKLTVL

SEQ ID NO: 6590 - protein, 9 aa, synthetic construct
  REGION 1..9: note = manelimab light chain CDR1
SGTVTAINY

SEQ ID NO: 6591 - skipped

SEQ ID NO: 6592 - protein, 10 aa, synthetic construct
  REGION 1..10: note = manelimab light chain CDR3
ALYMGNGGHM

SEQ ID NO: 6593 - protein, 120 aa, synthetic construct
  REGION 1..120: note = margetuximab heavy chain V region
QVQLQQSGPELVKPGASLKLSCTASGFNIKDTYIHWVKQRPEQGLEWIGRIYPTNGYTRYDPKFQDKATITADTSSNTAYLQVSRLTSEDTAVYYCSRWGGDGFYAMDYWGQGASVTVSS

SEQ ID NO: 6594 - protein, 8 aa, synthetic construct
  REGION 1..8: note = margetuximab heavy chain CDR1
GFNIKDTY

SEQ ID NO: 6595 - protein, 8 aa, synthetic construct
  REGION 1..8: note = margetuximab heavy chain CDR2
IYPTNGYT

SEQ ID NO: 6596 - protein, 13 aa, synthetic construct
  REGION 1..13: note = margetuximab heavy chain CDR3
SRWGGDGFYAMDY

SEQ ID NO: 6597 - protein, 107 aa, synthetic construct
  REGION 1..107: note = margetuximab light chain V region
DIVMTQSHKFMSTSVGDRVSITCKASQDVNTAVAWYQQKPGHSPKLLIYSASFRYTGVPDRFTGSRSGTDFTFTISSVQAEDLAVYYCQQHYTTPPTFGGGTKVEIK

SEQ ID NO: 6598 - protein, 5 aa, synthetic construct
  REGION 1..5: note = margetuximab light chain CDR1
QDVNT

SEQ ID NO: 6599 - skipped

SEQ ID NO: 6600 - protein, 9 aa, synthetic construct
  REGION 1..9: note = margetuximab light chain CDR3
QQHYTTPPT

SEQ ID NO: 6601 - protein, 120 aa, synthetic construct
  REGION 1..120: note = marstacimab heavy chain V region
EVQLLESGGGLVQPGGSLRLSCAASGFTFSSYAMSWVRQAPGKGLEWVSAISGSGGSTYYADSVKGRFTISRDNSKNTLYLQMNSLRAEDTAVYYCAILGATSLSAFDIWGQGTMVTVSS

SEQ ID NO: 6602 - protein, 7 aa, synthetic construct
  REGION 1..7: note = marstacimab heavy chain CDR1
GFTFSSY

SEQ ID NO: 6603 - protein, 8 aa, synthetic construct
  REGION 1..8: note = marstacimab heavy chain CDR2
ISGSGGST

SEQ ID NO: 6604 - protein, 13 aa, synthetic construct
  REGION 1..13: note = marstacimab heavy chain CDR3
AILGATSLSAFDI

SEQ ID NO: 6605 - protein, 112 aa, synthetic construct
  REGION 1..112: note = marstacimab light chain V region
QSVLTQPPSVSGAPGQRVTISCTGSSSNIGAGYDVHWYQQLPGTAPKLLIYGNSNRPSGVPDRFSGSKSGTSASLAITGLQAEDEADYYCQSYDSSLSGSGVFGGGTKLTVL

SEQ ID NO: 6606 - protein, 9 aa, synthetic construct
  REGION 1..9: note = marstacimab light chain CDR1
SSNIGAGYD

SEQ ID NO: 6607 - skipped

SEQ ID NO: 6608 - protein, 12 aa, synthetic construct
  REGION 1..12: note = marstacimab light chain CDR3
QSYDSSLSGSGV

SEQ ID NO: 6609 - protein, 120 aa, synthetic construct
  REGION 1..120: note = mavrilimumab heavy chain V region
QVQLVQSGAEVKKPGASVKVSCKVSGYTLTELSIHWVRQAPGKGLEWMGGFDPEENEIVYAQRFQGRVTMTEDTSTDTAYMELSSLRSEDTAVYYCAIVGSFSPLTLGLWGQGTMVTVSS

SEQ ID NO: 6610 - protein, 8 aa, synthetic construct
  REGION 1..8: note = mavrilimumab heavy chain CDR1
GYTLTELS

SEQ ID NO: 6611 - protein, 8 aa, synthetic construct
  REGION 1..8: note = mavrilimumab heavy chain CDR2
FDPEENEI

SEQ ID NO: 6612 - protein, 13 aa, synthetic construct
  REGION 1..13: note = mavrilimumab heavy chain CDR3
AIVGSFSPLTLGL

SEQ ID NO: 6613 - protein, 111 aa, synthetic construct
  REGION 1..111: note = mavrilimumab light chain V region
QSVLTQPPSVSGAPGQRVTISCTGSGSNIGAPYDVSWYQQLPGTAPKLLIYHNNKRPSGVPDRFSGSKSGTSASLAITGLQAEDEADYYCATVEAGLSGSVFGGGTKLTVL

SEQ ID NO: 6614 - protein, 9 aa, synthetic construct
  REGION 1..9: note = mavrilimumab light chain CDR1
GSNIGAPYD

SEQ ID NO: 6615 - skipped

SEQ ID NO: 6616 - protein, 11 aa, synthetic construct
  REGION 1..11: note = mavrilimumab light chain CDR3
ATVEAGLSGSV

SEQ ID NO: 6617 - protein, 115 aa, synthetic construct
  REGION 1..115: note = melredableukin alfa heavy chain V region
EVQLLESGGGLVQPGGSLRLSCAASGFTFSSYAMSWVRQAPGKGLEWVSAISGSGGSTYYADSVKGRFTISRDNSKNTLYLQMNSLRAEDTAVYYCAKGSGFDYWGQGTLVTVSS

SEQ ID NO: 6618 - protein, 7 aa, synthetic construct
  REGION 1..7: note = melredableukin alfa heavy chain CDR1
GFTFSSY

SEQ ID NO: 6619 - protein, 8 aa, synthetic construct
  REGION 1..8: note = melredableukin alfa heavy chain CDR2
ISGSGGST

SEQ ID NO: 6620 - protein, 8 aa, synthetic construct
  REGION 1..8: note = melredableukin alfa heavy chain CDR3
AKGSGFDY

SEQ ID NO: 6621 - protein, 108 aa, synthetic construct
  REGION 1..108: note = melredableukin alfa light chain V region
EIVLTQSPGTLSLSPGERATLSCRASQSVSSSYLAWYQQKPGQAPRLLIYGASSRATGIPDRFSGSGSGTDFTLTISRLEPEDFAVYYCQQYGSSPLTFGQGTKVEIK

SEQ ID NO: 6622 - protein, 7 aa, synthetic construct
  REGION 1..7: note = melredableukin alfa light chain CDR1
QSVSSSY

SEQ ID NO: 6623 - skipped

SEQ ID NO: 6624 - protein, 9 aa, synthetic construct
  REGION 1..9: note = melredableukin alfa light chain CDR3
QQYGSSPLT

SEQ ID NO: 6625 - protein, 123 aa, synthetic construct
  REGION 1..123: note = melrilimab heavy chain V region
EVQLLESGGGLVQPGGSLRLSCAASGFTFSIYDMIWVRQAPGKGLEWVSSIRGEGGGTYYADSVKGRFTISRDNSKNTLYLQMNSLRAEDTAVYYCARDPWSTEGSFFVLDYWGQGTLVTVSS

SEQ ID NO: 6626 - protein, 8 aa, synthetic construct
  REGION 1..8: note = melrilimab heavy chain CDR1
GFTFSIYD

SEQ ID NO: 6627 - protein, 8 aa, synthetic construct
  REGION 1..8: note = melrilimab heavy chain CDR2
IRGEGGGT

SEQ ID NO: 6628 - protein, 16 aa, synthetic construct
  REGION 1..16: note = melrilimab heavy chain CDR3
ARDPWSTEGSFFVLDY

SEQ ID NO: 6629 - protein, 107 aa, synthetic construct
  REGION 1..107: note = melrilimab light chain V region
EIVLTQSPATLSLSPGERATLSCRASQSVDDDLAWYQQKPGQAPRLLIYDASNRATGIPARFSGSGSGTDFTLTISSLEPEDFAVYYCQQYITAPLTFGQGTKVEIK

SEQ ID NO: 6630 - protein, 6 aa, synthetic construct
  REGION 1..6: note = melrilimab light chain CDR1
QSVDDD

SEQ ID NO: 6631 - skipped

SEQ ID NO: 6632 - protein, 9 aa, synthetic construct
  REGION 1..9: note = melrilimab light chain CDR3
QQYITAPLT

SEQ ID NO: 6633 - protein, 119 aa, synthetic construct
  REGION 1..119: note = mibavademab heavy chain V region
QVQLVESGGSVVQPGRSLRLSCAASGFTFSTYAMYWVRQTPGKGLEWVAVLYSDGSNKYYIDSVKGRFTISRDTSTNTLYLQMSSLRADDSALYYCARLNWDYWYFDLWGRGTLVTVSS

SEQ ID NO: 6634 - protein, 8 aa, synthetic construct
  REGION 1..8: note = mibavademab heavy chain CDR1
GFTFSTYA

SEQ ID NO: 6635 - protein, 8 aa, synthetic construct
  REGION 1..8: note = mibavademab heavy chain CDR2
LYSDGSNK

SEQ ID NO: 6636 - protein, 12 aa, synthetic construct
  REGION 1..12: note = mibavademab heavy chain CDR3
ARLNWDYWYFDL

SEQ ID NO: 6637 - protein, 108 aa, synthetic construct
  REGION 1..108: note = mibavademab light chain V region
DIQMTQSPSSLSASVGDRVTITCRASQSISSYLNWYQQKPGKAPKLLIYAASSLQSGVPSRFSGSGSGTDFTLTISSLQPEDFATYYCQQSYSTPPITFGQGTRLEIK

SEQ ID NO: 6638 - protein, 6 aa, synthetic construct
  REGION 1..6: note = mibavademab light chain CDR1
QSISSY

SEQ ID NO: 6639 - skipped

SEQ ID NO: 6640 - protein, 10 aa, synthetic construct
  REGION 1..10: note = mibavademab light chain CDR3
QQSYSTPPIT

SEQ ID NO: 6641 - protein, 116 aa, synthetic construct
  REGION 1..116: note = mirzotamab heavy chain V region
EVQLQESGPGLVKPSETLSLTCAVTGYSITSGYSWHWIRQFPGNGLEWMGYIHSSGSTNYNPSLKSRISISRDTSKNQFFLKLSSVTAADTAVYYCAGYDDYFEYWGQGTTVTVSS

SEQ ID NO: 6642 - protein, 9 aa, synthetic construct
  REGION 1..9: note = mirzotamab heavy chain CDR1
GYSITSGYS

SEQ ID NO: 6643 - protein, 7 aa, synthetic construct
  REGION 1..7: note = mirzotamab heavy chain CDR2
IHSSGST

SEQ ID NO: 6644 - protein, 9 aa, synthetic construct
  REGION 1..9: note = mirzotamab heavy chain CDR3
AGYDDYFEY

SEQ ID NO: 6645 - protein, 107 aa, synthetic construct
  REGION 1..107: note = mirzotamab light chain V region
DIQMTQSPSSLSASVGDRVTITCKASQNVGFNVAWYQQKPGKSPKALIYSASYRYSGVPSRFSGSGSGTDFTLTISSLQPEDFAEYFCQQYNWYPFTFGQGTKLEIK

SEQ ID NO: 6646 - protein, 6 aa, synthetic construct
  REGION 1..6: note = mirzotamab light chain CDR1
QNVGFN

SEQ ID NO: 6647 - skipped

SEQ ID NO: 6648 - protein, 10 aa, synthetic construct
  REGION 1..10: note = mirzotamab light chain CDR3
QQYNWYPFTF

SEQ ID NO: 6649 - protein, 116 aa, synthetic construct; identical to SEQ ID NO: 6641
  REGION 1..116: note = mirzotamab clezutoclax heavy chain V region

SEQ ID NO: 6650 - protein, 9 aa, synthetic construct
  REGION 1..9: note = mirzotamab clezutoclax heavy chain CDR1
GYSITSGYS

SEQ ID NO: 6651 - protein, 7 aa, synthetic construct
  REGION 1..7: note = mirzotamab clezutoclax heavy chain CDR2
IHSSGST

SEQ ID NO: 6652 - protein, 9 aa, synthetic construct
  REGION 1..9: note = mirzotamab clezutoclax heavy chain CDR3
AGYDDYFEY

SEQ ID NO: 6653 - protein, 107 aa, synthetic construct; identical to SEQ ID NO: 6645
  REGION 1..107: note = mirzotamab clezutoclax light chain V region

SEQ ID NO: 6654 - protein, 7 aa, synthetic construct
  REGION 1..7: note = mirzotamab clezutoclax light chain CDR1
QNVGFNV

SEQ ID NO: 6655 - skipped

SEQ ID NO: 6656 - protein, 9 aa, synthetic construct
  REGION 1..9: note = mirzotamab clezutoclax light chain CDR3
QQYNWYPFT

SEQ ID NO: 6657 - protein, 119 aa, synthetic construct
  REGION 1..119: note = mogamulizumab heavy chain V region
EVQLVESGGDLVQPGRSLRLSCAASGFIFSNYGMSWVRQAPGKGLEWVATISSASTYSYYPDSVKGRFTISRDNAKNSLYLQMNSLRVEDTALYYCGRHSDGNFAFGYWGQGTLVTVSS

SEQ ID NO: 6658 - protein, 7 aa, synthetic construct
  REGION 1..7: note = mogamulizumab heavy chain CDR1
GFIFSNY

SEQ ID NO: 6659 - protein, 8 aa, synthetic construct
  REGION 1..8: note = mogamulizumab heavy chain CDR2
ISSASTYS

SEQ ID NO: 6660 - protein, 12 aa, synthetic construct
  REGION 1..12: note = mogamulizumab heavy chain CDR3
GRHSDGNFAFGY

SEQ ID NO: 6661 - protein, 112 aa, synthetic construct
  REGION 1..112: note = mogamulizumab light chain V region
DVLMTQSPLSLPVTPGEPASISCRSSRNIVHINGDTYLEWYLQKPGQSPQLLIYKVSNRFSGVPDRFSGSGSGTDFTLKISRVEAEDVGVYYCFQGSLLPWTFGQGTKVEIK

SEQ ID NO: 6662 - protein, 11 aa, synthetic construct
  REGION 1..11: note = mogamulizumab light chain CDR1
RNIVHINGDTY

SEQ ID NO: 6663 - skipped

SEQ ID NO: 6664 - protein, 9 aa, synthetic construct
  REGION 1..9: note = mogamulizumab light chain CDR3
FQGSLLPWT

SEQ ID NO: 6665 - protein, 124 aa, synthetic construct
  REGION 1..124: note = moxetumomab pasudotox heavy chain V region
MEVQLVESGGGLVKPGGSLKLSCAASGFAFSIYDMSWVRQTPEKCLEWVAYISSGGGTTYYPDTVKGRFTISRDNAKNTLYLQMSSLKSEDTAMYYCARHSGYGTHWGVLFAYWGQGTLVTVSA

SEQ ID NO: 6666 - protein, 8 aa, synthetic construct
  REGION 1..8: note = moxetumomab pasudotox heavy chain CDR1
GFAFSIYD

SEQ ID NO: 6667 - protein, 8 aa, synthetic construct
  REGION 1..8: note = moxetumomab pasudotox heavy chain CDR2
ISSGGGTT

SEQ ID NO: 6668 - protein, 16 aa, synthetic construct
  REGION 1..16: note = moxetumomab pasudotox heavy chain CDR3
ARHSGYGTHWGVLFAY

SEQ ID NO: 6669 - protein, 108 aa, synthetic construct
  REGION 1..108: note = moxetumomab pasudotox light chain V region
MDIQMTQTTSSLSASLGDRVTISCRASQDISNYLNWYQQKPDGTVKLLIYYTSILHSGVPSRFSGSGSGTDYSLTISNLEQEDFATYFCQQGNTLPWTFGCGTKLEIK

SEQ ID NO: 6670 - protein, 6 aa, synthetic construct
  REGION 1..6: note = moxetumomab pasudotox light chain CDR1
QDISNY

SEQ ID NO: 6671 - skipped

SEQ ID NO: 6672 - protein, 9 aa, synthetic construct
  REGION 1..9: note = moxetumomab pasudotox light chain CDR3
QQGNTLPWT

SEQ ID NO: 6673 - protein, 124 aa, synthetic construct
  REGION 1..124: note = nadecnemab heavy chain V region
EVQLVESGGGLVQPGGSLRLSCAASGFTFSSYAMSWVRQAPGKGLEWVSVISGSGGSTYYADAVKGRFTISRDNSKHTLYLQMNSLRAEDTAVYYCTKPSSYSSSNFYYGMDVWGQGTTVTVSS

SEQ ID NO: 6674 - protein, 7 aa, synthetic construct
  REGION 1..7: note = nadecnemab heavy chain CDR1
GFTFSSY

SEQ ID NO: 6675 - protein, 8 aa, synthetic construct
  REGION 1..8: note = nadecnemab heavy chain CDR2
ISGSGGST

SEQ ID NO: 6676 - protein, 17 aa, synthetic construct
  REGION 1..17: note = nadecnemab heavy chain CDR3
TKPSSYSSSNFYYGMDV

SEQ ID NO: 6677 - protein, 107 aa, synthetic construct
  REGION 1..107: note = nadecnemab light chain V region
DIQMTQSPSSVSASVGDRVTITCRASQGISSWLAWYQQKPGKAPKLLIYAASSLQSGVPSRFSGSGSGTDFTLTISSLQPEDFATYYCQQTNSFPFPFGPGTKVDIK

SEQ ID NO: 6678 - protein, 6 aa, synthetic construct
  REGION 1..6: note = nadecnemab light chain CDR1
QGISSW

SEQ ID NO: 6679 - skipped

SEQ ID NO: 6680 - protein, 9 aa, synthetic construct
  REGION 1..9: note = nadecnemab light chain CDR3
QQTNSFPFP

SEQ ID NO: 6681 - protein, 119 aa, synthetic construct
  REGION 1..119: note = namilumab heavy chain V region
QVQLVQSGAEVKKPGASVKVSCKAFGYPFTDYLLHWVRQAPGQGLEWVGWLNPYSGDTNYAQKFQGRVTMTRDTSISTAYMELSRLRSDDTAVYYCTRTTLISVYFDYWGQGTMVTVSS

SEQ ID NO: 6682 - protein, 8 aa, synthetic construct
  REGION 1..8: note = namilumab heavy chain CDR1
GYPFTDYL

SEQ ID NO: 6683 - protein, 8 aa, synthetic construct
  REGION 1..8: note = namilumab heavy chain CDR2
LNPYSGDT

SEQ ID NO: 6684 - protein, 12 aa, synthetic construct
  REGION 1..12: note = namilumab heavy chain CDR3
TRTTLISVYFDY

SEQ ID NO: 6685 - protein, 107 aa, synthetic construct
  REGION 1..107: note = namilumab light chain V region
DIQMTQSPSSVSASVGDRVTIACRASQNIRNILNWYQQRPGKAPQLLIYAASNLQSGVPSRFSGSGSGTDFTLTINSLQPEDFATYYCQQSYSMPRTFGGGTKLEIK

SEQ ID NO: 6686 - protein, 6 aa, synthetic construct
  REGION 1..6: note = namilumab light chain CDR1
QNIRNI

SEQ ID NO: 6687 - skipped

SEQ ID NO: 6688 - protein, 9 aa, synthetic construct
  REGION 1..9: note = namilumab light chain CDR3
QQSYSMPRT

SEQ ID NO: 6689 - protein, 122 aa, synthetic construct
  REGION 1..122: note = narnatumab heavy chain V region
EVQLVESGGGLVQPGGSLRLSCAASGFTFSSYLMTWVRQAPGKGLEWVANIKQDGSEKYYVDSVKGRFTISRDNAKNSLNLQMNSLRAEDTAVYYCTRDGYSSGRHYGMDVWGQGTTVIVSS

SEQ ID NO: 6690 - protein, 7 aa, synthetic construct
  REGION 1..7: note = narnatumab heavy chain CDR1
GFTFSSY

SEQ ID NO: 6691 - protein, 8 aa, synthetic construct
  REGION 1..8: note = narnatumab heavy chain CDR2
IKQDGSEK

SEQ ID NO: 6692 - protein, 15 aa, synthetic construct
  REGION 1..15: note = narnatumab heavy chain CDR3
TRDGYSSGRHYGMDV

SEQ ID NO: 6693 - protein, 107 aa, synthetic construct
  REGION 1..107: note = narnatumab light chain V region
EIVLTQSPATLSLSPGERATLSCRASQSVSRYLAWYQQKPGQAPRLLIYDASNRATGIPARFSGSGSGTDFTLTISSLEPEDFAVYYCQQRSNWPRTFGQGTKVEIK

SEQ ID NO: 6694 - protein, 6 aa, synthetic construct
  REGION 1..6: note = narnatumab light chain CDR1
QSVSRY

SEQ ID NO: 6695 - skipped

SEQ ID NO: 6696 - protein, 9 aa, synthetic construct
  REGION 1..9: note = narnatumab light chain CDR3
QQRSNWPRT

SEQ ID NO: 6697 - protein, 118 aa, synthetic construct
  REGION 1..118: note = narsoplimab heavy chain V region
QVTLKESGPVLVKPTETLTLTCTVSGFSLSRGKMGVSWIRQPPGKALEWLAHIFSSDEKSYRTSLKSRLTISKDTSKNQVVLTMTNMDPVDTATYYCARIRRGGIDYWGQGTLVTVSS

SEQ ID NO: 6698 - protein, 10 aa, synthetic construct
  REGION 1..10: note = narsoplimab heavy chain CDR1
GFSLSRGKMG

SEQ ID NO: 6699 - protein, 7 aa, synthetic construct
  REGION 1..7: note = narsoplimab heavy chain CDR2
IFSSDEK

SEQ ID NO: 6700 - protein, 10 aa, synthetic construct
  REGION 1..10: note = narsoplimab heavy chain CDR3
ARIRRGGIDY

SEQ ID NO: 6701 - protein, 106 aa, synthetic construct
  REGION 1..106: note = narsoplimab light chain V region
QPVLTQPPSLSVSPGQTASITCSGEKLGDKYAYWYQQKPGQSPVLVMYQDKQRPSGIPERFSGSNSGNTATLTISGTQAMDEADYYCQAWDSSTAVFGGGTKLTVL

SEQ ID NO: 6702 - protein, 6 aa, synthetic construct
  REGION 1..6: note = narsoplimab light chain CDR1
KLGDKY

SEQ ID NO: 6703 - skipped

SEQ ID NO: 6704 - protein, 9 aa, synthetic construct
  REGION 1..9: note = narsoplimab light chain CDR3
QAWDSSTAV

SEQ ID NO: 6705 - protein, 126 aa, synthetic construct [sequence omitted]

SEQ ID NO: 6706 - protein, 8 aa, synthetic construct
  REGION 1..8: note = navivumab heavy chain CDR1
GYSFSTYG

SEQ ID NO: 6707 - protein, 8 aa, synthetic construct
  REGION 1..8: note = navivumab heavy chain CDR2
ISAYTGIT

SEQ ID NO: 6708 - protein, 19 aa, synthetic construct
  REGION 1..19: note = navivumab heavy chain CDR3
ARDKVQGRVEVGSGGRHDY

SEQ ID NO: 6709 - protein, 108 aa, synthetic construct [sequence omitted]

SEQ ID NO: 6710 - protein, 7 aa, synthetic construct
  REGION 1..7: note = navivumab light chain CDR1
HRVGSTY

SEQ ID NO: 6711 - skipped

SEQ ID NO: 6712 - protein, 9 aa, synthetic construct
  REGION 1..9: note = navivumab light chain CDR3
QQFSVSPWT

SEQ ID NO: 6713 - protein, 119 aa, synthetic construct
  REGION 1..119: note = naxitamab heavy chain V region
QVQLVESGPGVVQPGRSLRISCAVSGFSVTNYGVHWVRQPPGKGLEWLGVIWAGGITNYNSAFMSRLTISKDNSKNTVYLQMNSLRAEDTAMYYCASRGGHYGYALDYWGQGTLVTVSS

SEQ ID NO: 6714 - protein, 8 aa, synthetic construct
  REGION 1..8: note = naxitamab heavy chain CDR1
GFSVTNYG

SEQ ID NO: 6715 - protein, 7 aa, synthetic construct
  REGION 1..7: note = naxitamab heavy chain CDR2
IWAGGIT

SEQ ID NO: 6716 - protein, 13 aa, synthetic construct
  REGION 1..13: note = naxitamab heavy chain CDR3
ASRGGHYGYALDY

SEQ ID NO: 6717 - protein, 104 aa, synthetic construct
  REGION 1..104: note = naxitamab light chain V region
EIVMTQTPATLSVSAGERVTITCKASQSVSNDVTWYQQKPGQAPRLLIYSASNRYSGVPARFSGSGYGTEFTFTISSVQSEDFAVYFCQQDYSSFGQGTKLEIK

SEQ ID NO: 6718 - protein, 6 aa, synthetic construct
  REGION 1..6: note = naxitamab light chain CDR1
QSVSND

SEQ ID NO: 6719 - skipped

SEQ ID NO: 6720 - protein, 6 aa, synthetic construct
  REGION 1..6: note = naxitamab light chain CDR3
QQDYSS

SEQ ID NO: 6721 - protein, 121 aa, synthetic construct [sequence omitted]

SEQ ID NO: 6722 - protein, 10 aa, synthetic construct
  REGION 1..10: note = necitumumab heavy chain CDR1
GGSISSGDYY

SEQ ID NO: 6723 - protein, 7 aa, synthetic construct
  REGION 1..7: note = necitumumab heavy chain CDR2
IYYSGST

SEQ ID NO: 6724 - protein, 13 aa, synthetic construct
  REGION 1..13: note = necitumumab heavy chain CDR3
ARVSIFGVGTFDY

SEQ ID NO: 6725 - protein, 107 aa, synthetic construct [sequence omitted]

SEQ ID NO: 6726 - protein, 6 aa, synthetic construct
  REGION 1..6: note = necitumumab light chain CDR1
QSVSSY

SEQ ID NO: 6727 - skipped

SEQ ID NO: 6728 - protein, 9 aa, synthetic construct
  REGION 1..9: note = necitumumab light chain CDR3
HQYGSTPLT

SEQ ID NO: 6729 - protein, 122 aa, synthetic construct
  REGION 1..122: note = nesvacumab heavy chain V region
EVQLVESGGGLVQPGGSLRLSCAASGFTFSSYDIHWVRQATGKGLEWVSAIGPAGDTYYPGSVKGRFTISRENAKNSLYLQMNSLRAGDTAVYYCARGLITFGGLIAPFDYWGQGTLVTVSS

SEQ ID NO: 6730 - protein, 7 aa, synthetic construct
  REGION 1..7: note = nesvacumab heavy chain CDR1
GFTFSSY

SEQ ID NO: 6731 - protein, 7 aa, synthetic construct
  REGION 1..7: note = nesvacumab heavy chain CDR2
IGPAGDT

SEQ ID NO: 6732 - protein, 16 aa, synthetic construct
  REGION 1..16: note = nesvacumab heavy chain CDR3
ARGLITFGGLIAPFDY

SEQ ID NO: 6733 - protein, 107 aa, synthetic construct
  REGION 1..107: note = nesvacumab light chain V region
EIVLTQSPGTLSLSPGERATLSCRASQSVSSTYLAWYQQKPGQAPRLLIYGASSRATGIPDRFSGSGSGTDFTLTISRLEPEDFAVYYCQHYDNSQTFGQGTKVEIK

SEQ ID NO: 6734 - protein, 6 aa, synthetic construct
  REGION 1..6: note = nesvacumab light chain CDR1
QSVSST

SEQ ID NO: 6735 - skipped

SEQ ID NO: 6736 - protein, 8 aa, synthetic construct
  REGION 1..8: note = nesvacumab light chain CDR3
QHYDNSQT

SEQ ID NO: 6737 - protein, 125 aa, synthetic construct
  REGION 1..125: note = netakimab heavy chain V region
QVQLVQSGGGLVQAGGSLRLSCAASGGTFATSPMGWLRQAPGKGTEFVAAISPSGGDRIYADSVKGRFTISRDNAGYFIYLQMNSLKPEDTAVYYCAVRRRFDGTSYYTGDYDSWGQGTLVTVSS

SEQ ID NO: 6738 - protein, 8 aa, synthetic construct
  REGION 1..8: note = netakimab heavy chain CDR1
GGTFATSP

SEQ ID NO: 6739 - protein, 7 aa, synthetic construct
  REGION 1..7: note = netakimab heavy chain CDR2
ISPSGGD

SEQ ID NO: 6740 - protein, 19 aa, synthetic construct
  REGION 1..19: note = netakimab heavy chain CDR3
CAVRRRFDGTSYYTGDYDS

SEQ ID NO: 6741 - protein, 108 aa, synthetic construct
  REGION 1..108: note = netakimab light chain V region
EIVLTQSPGTLSLSPGERATLSCRASQSVSSSYLAWYQQKPGQAPRLLIYDASSRATGIPDRFSGSGSGTDFTLTISRLEPEDFAVYYCQQYSYSPVTFGQGTKVEIK

SEQ ID NO: 6742 - protein, 7 aa, synthetic construct
  REGION 1..7: note = netakimab light chain CDR1
QSVSSSY

SEQ ID NO: 6743 - skipped

SEQ ID NO: 6744 - protein, 9 aa, synthetic construct
  REGION 1..9: note = netakimab light chain CDR3
QQYSYSPVT

SEQ ID NO: 6745 - protein, 116 aa, synthetic construct
  REGION 1..116: note = nipocalimab heavy chain V region
EVQLLESGGGLVQPGGSLRLSCAASGFTFSTYAMGWVRQAPGKGLEWVSSIGASGSQTRYADSVKGRFTISRDNSKNTLYLQMNSLRAEDTAVYYCARLAIGDSYWGQGTMVTVSS

SEQ ID NO: 6746 - protein, 7 aa, synthetic construct
  REGION 1..7: note = nipocalimab heavy chain CDR1
GFTFSTY

SEQ ID NO: 6747 - protein, 8 aa, synthetic construct
  REGION 1..8: note = nipocalimab heavy chain CDR2
IGASGSQT

SEQ ID NO: 6748 - protein, 9 aa, synthetic construct
  REGION 1..9: note = nipocalimab heavy chain CDR3
ARLAIGDSY

SEQ ID NO: 6749 - protein, 110 aa, synthetic construct
  REGION 1..110: note = nipocalimab light chain V region
QSALTQPASVSGSPGQSITISCTGTGSDVGSYNLVSWYQQHPGKAPKLMIYGDSERPSGVSNRFSGSKSGNTASLTISGLQAEDEADYYCSSYAGSGIYVFGTGTKVTVL

SEQ ID NO: 6750 - protein, 9 aa, synthetic construct
  REGION 1..9: note = nipocalimab light chain CDR1
GSDVGSYNL

SEQ ID NO: 6751 - skipped

SEQ ID NO: 6752 - protein, 10 aa, synthetic construct
  REGION 1..10: note = nipocalimab light chain CDR3
SSYAGSGIYV

SEQ ID NO: 6753 - protein, 113 aa, synthetic construct [sequence omitted]

SEQ ID NO: 6754 - protein, 8 aa, synthetic construct
  REGION 1..8: note = nivolumab heavy chain CDR1
GITFSNSG

SEQ ID NO: 6755 - protein, 8 aa, synthetic construct
  REGION 1..8: note = nivolumab heavy chain CDR2
IWYDGSKR

SEQ ID NO: 6756 - protein, 6 aa, synthetic construct
  REGION 1..6: note = nivolumab heavy chain CDR3
ATNDDY

SEQ ID NO: 6757 - protein, 107 aa, synthetic construct [sequence omitted]

SEQ ID NO: 6758 - protein, 6 aa, synthetic construct
  REGION 1..6: note = nivolumab light chain CDR1
QSVSSY

SEQ ID NO: 6759 - skipped

SEQ ID NO: 6760 - protein, 9 aa, synthetic construct
  REGION 1..9: note = nivolumab light chain CDR3
QQSSNWPRT

SEQ ID NO: 6761 - protein, 118 aa, synthetic construct
  REGION 1..118: note = nurulimab heavy chain V region
EVQLVESGGGVVQPGRSLRLSCAASGFTFSSYTMHWVRQAPGKGLEWVTFISYDGNNKYYADSVKGRFTISRDNSKNTLYLQMNSLRAEDTAIYYCARTGWLGPFDYWGQGTLVTVSS

SEQ ID NO: 6762 - protein, 7 aa, synthetic construct
  REGION 1..7: note = nurulimab heavy chain CDR1
GFTFSSY

SEQ ID NO: 6763 - protein, 8 aa, synthetic construct
  REGION 1..8: note = nurulimab heavy chain CDR2
ISYDGNNK

SEQ ID NO: 6764 - protein, 11 aa, synthetic construct
  REGION 1..11: note = nurulimab heavy chain CDR3
ARTGWLGPFDY

SEQ ID NO: 6765 - protein, 108 aa, synthetic construct; identical to SEQ ID NO: 6389
  REGION 1..108: note = nurulimab light chain V region

SEQ ID NO: 6766 - protein, 7 aa, synthetic construct
  REGION 1..7: note = nurulimab light chain CDR1
QSVGSSY

SEQ ID NO: 6767 - skipped

SEQ ID NO: 6768 - protein, 9 aa, synthetic construct
  REGION 1..9: note = nurulimab light chain CDR3
QQYGSSPWT

SEQ ID NO: 6769 - protein, 119 aa, synthetic construct
  REGION 1..119: note = obiltoxaximab heavy chain V region
QVQLQQSGPELKKPGASVKVSCKDSGYAFSSSWMNWVRQAPGQGLEWIGRIYPGDGDTNYNGKFQGRVTITADKSSSTAYMELSSLRSEDTAVYFCARSGLLRYAMDYWGQGTLVTVSS

SEQ ID NO: 6770 - protein, 8 aa, synthetic construct
  REGION 1..8: note = obiltoxaximab heavy chain CDR1
GYAFSSSW

SEQ ID NO: 6771 - protein, 8 aa, synthetic construct
  REGION 1..8: note = obiltoxaximab heavy chain CDR2
IYPGDGDT

SEQ ID NO: 6772 - protein, 12 aa, synthetic construct
  REGION 1..12: note = obiltoxaximab heavy chain CDR3
ARSGLLRYAMDY

SEQ ID NO: 6773 - protein, 107 aa, synthetic construct
  REGION 1..107: note = obiltoxaximab light chain V region
DIQMTQSPSSLSASVGDRVTITCRASQDIRNYLNWYQQKPGKAVKLLIYYTSRLLPGVPSRFSGSGSGTDYSLTISSQEQEDIGTYFCQQGNTLPWTFGQGTKVEIR

SEQ ID NO: 6774 - protein, 6 aa, synthetic construct
  REGION 1..6: note = obiltoxaximab light chain CDR1
QDIRNY

SEQ ID NO: 6775 - skipped

SEQ ID NO: 6776 - protein, 9 aa, synthetic construct
  REGION 1..9: note = obiltoxaximab light chain CDR3
QQGNTLPWT

SEQ ID NO: 6777 - protein, 119 aa, synthetic construct
  REGION 1..119: note = obinutuzumab heavy chain V region
QVQLVQSGAEVKKPGSSVKVSCKASGYAFSYSWINWVRQAPGQGLEWMGRIFPGDGDTDYNGKFKGRVTITADKSTSTAYMELSSLRSEDTAVYYCARNVFDGYWLVYWGQGTLVTVSS

SEQ ID NO: 6778 - protein, 8 aa, synthetic construct
  REGION 1..8: note = obinutuzumab heavy chain CDR1
GYAFSYSW

SEQ ID NO: 6779 - protein, 9 aa, synthetic construct
  REGION 1..9: note = obinutuzumab heavy chain CDR2
IFPGDGDTD

SEQ ID NO: 6780 - protein, 12 aa, synthetic construct
  REGION 1..12: note = obinutuzumab heavy chain CDR3
ARNVFDGYWLVY

SEQ ID NO: 6781 - protein, 112 aa, synthetic construct
  REGION 1..112: note = obinutuzumab light chain V region
DIVMTQTPLSLPVTPGEPASISCRSSKSLLHSNGITYLYWYLQKPGQSPQLLIYQMSNLVSGVPDRFSGSGSGTDFTLKISRVEAEDVGVYYCAQNLELPYTFGGGTKVEIK

SEQ ID NO: 6782 - protein, 11 aa, synthetic construct
  REGION 1..11: note = obinutuzumab light chain CDR1
KSLLHSNGITY

SEQ ID NO: 6783 - skipped

SEQ ID NO: 6784 - protein, 9 aa, synthetic construct
  REGION 1..9: note = obinutuzumab light chain CDR3
AQNLELPYT

SEQ ID NO: 6785 - protein, 118 aa, synthetic construct
  REGION 1..118: note = odesivimab heavy chain V region
EVQLVESGGGLVQPGGSLRLSCAASGFTFSSYDMHWVRQATGKGLEWVSAIGTAGDTYYPGSVKGRFTISRENAKNSLYLQMNSLRAGDTAVYYCARTWFGELYFDYWGQGTLVTVSS

SEQ ID NO: 6786 - protein, 7 aa, synthetic construct
  REGION 1..7: note = odesivimab heavy chain CDR1
GFTFSSY

SEQ ID NO: 6787 - protein, 7 aa, synthetic construct
  REGION 1..7: note = odesivimab heavy chain CDR2
IGTAGDT

SEQ ID NO: 6788 - protein, 12 aa, synthetic construct
  REGION 1..12: note = odesivimab heavy chain CDR3
ARTWFGELYFDY

SEQ ID NO: 6789 - protein, 113 aa, synthetic construct
  REGION 1..113: note = odesivimab light chain V region
DIVMTQSPDSLAVSLGERATINCKSSQSVLYSSNNKNYLAWYQQKPGQPPKLLIYWASTRESGVPDRFSGSGSGTEFTLTITSLQAEDVAVYYCQQYYSSPLTFGGGTKVEIK

SEQ ID NO: 6790 - protein, 12 aa, synthetic construct
  REGION 1..12: note = odesivimab light chain CDR1
QSVLYSSNNKNY

SEQ ID NO: 6791 - skipped

SEQ ID NO: 6792 - protein, 9 aa, synthetic construct
  REGION 1..9: note = odesivimab light chain CDR3
QQYYSSPLT

SEQ ID NO: 6793 - protein, 127 aa, synthetic construct
  REGION 1..127: note = olaratumab heavy chain V region
QLQLQESGPGLVKPSETLSLTCTVSGGSINSSSYYWGWLRQSPGKGLEWIGSFFYTGSTYYNPSLRSRLTISVDTSKNQFSLMLSSVTAADTAVYYCARQSTYYYGSGNYYGWFDRWDQGTLVTVSS

SEQ ID NO: 6794 - protein, 9 aa, synthetic construct
  REGION 1..9: note = olaratumab heavy chain CDR1
GSINSSSYY

SEQ ID NO: 6795 - protein, 7 aa, synthetic construct
  REGION 1..7: note = olaratumab heavy chain CDR2
FFYTGST

SEQ ID NO: 6796 - protein, 19 aa, synthetic construct
  REGION 1..19: note = olaratumab heavy chain CDR3
ARQSTYYYGSGNYYGWFDR

SEQ ID NO: 6797 - protein, 107 aa, synthetic construct
  REGION 1..107: note = olaratumab light chain V region
EIVLTQSPATLSLSPGERATLSCRASQSVSSYLAWYQQKPGQAPRLLIYDASNRATGIPARFSGSGSGTDFTLTISSLEPEDFAVYYCQQRSNWPPAFGQGTKVEIK

SEQ ID NO: 6798 - protein, 7 aa, synthetic construct
  REGION 1..7: note = olaratumab light chain CDR1
QSVSSYL

SEQ ID NO: 6799 - skipped

SEQ ID NO: 6800 - protein, 9 aa, synthetic construct
  REGION 1..9: note = olaratumab light chain CDR3
QQRSNWPPA

SEQ ID NO: 6801 - protein, 117 aa, synthetic construct
  REGION 1..117: note = oleclumab heavy chain V region
EVQLLESGGGLVQPGGSLRLSCAASGFTFSSYAYSWVRQAPGKGLEWVSAISGSGGRTYYADSVKGRFTISRDNSKNTLYLQMNSLRAEDTAVYYCARLGYGRVDEWGRGTLVTVSS

SEQ ID NO: 6802 - protein, 7 aa, synthetic construct
  REGION 1..7: note = oleclumab heavy chain CDR1
GFTFSSY

SEQ ID NO: 6803 - protein, 8 aa, synthetic construct
  REGION 1..8: note = oleclumab heavy chain CDR2
ISGSGGRT

SEQ ID NO: 6804 - protein, 10 aa, synthetic construct
  REGION 1..10: note = oleclumab heavy chain CDR3
ARLGYGRVDE

SEQ ID NO: 6805 - protein, 110 aa, synthetic construct
  REGION 1..110: note = oleclumab light chain V region
QSVLTQPPSASGTPGQRVTISCSGSLSNIGRNPVNWYQQLPGTAPKLLIYLDNLRLSGVPDRFSGSKSGTSASLAISGLQSEDEADYYCATWDDSHPGWTFGGGTKLTVL

SEQ ID NO: 6806 - protein, 8 aa, synthetic construct
  REGION 1..8: note = oleclumab light chain CDR1
LSNIGRNP

SEQ ID NO: 6807 - skipped

SEQ ID NO: 6808 - protein, 11 aa, synthetic construct
  REGION 1..11: note = oleclumab light chain CDR3
ATWDDSHPGWT

SEQ ID NO: 6809 - protein, 121 aa, synthetic construct [sequence omitted]

SEQ ID NO: 6810 - protein, 8 aa, synthetic construct
  REGION 1..8: note = omalizumab heavy chain CDR1
GYSITSGY

SEQ ID NO: 6811 - protein, 8 aa, synthetic construct
  REGION 1..8: note = omalizumab heavy chain CDR2
SITYDGST

SEQ ID NO: 6812 - protein, 14 aa, synthetic construct
  REGION 1..14: note = omalizumab heavy chain CDR3
ARGSHYFGHWHFAV

SEQ ID NO: 6813 - protein, 111 aa, synthetic construct [sequence omitted]

SEQ ID NO: 6814 - protein, 10 aa, synthetic construct
  REGION 1..10: note = omalizumab light chain CDR1
QSVDYDGDSY

SEQ ID NO: 6815 - skipped

SEQ ID NO: 6816 - protein, 9 aa, synthetic construct
  REGION 1..9: note = omalizumab light chain CDR3
QQSHEDPYT

SEQ ID NO: 6817 - protein, 118 aa, synthetic construct
  REGION 1..118: note = omburtamab heavy chain V region
QVQLQQSGAELVKPGASVKLSCKASGYTFTNYDINWVRQRPEQGLEWIGWIFPGDGSTQYNEKFKGKATLTTDTSSSTAYMQLSRLTSEDSAVYFCARQTTATWFAYWGQGTLVTVSA

SEQ ID NO: 6818 - protein, 8 aa, synthetic construct
  REGION 1..8: note = omburtamab heavy chain CDR1
GYTFTNYD

SEQ ID NO: 6819 - protein, 8 aa, synthetic construct
  REGION 1..8: note = omburtamab heavy chain CDR2
IFPGDGST

SEQ ID NO: 6820 - protein, 214 aa, synthetic construct
  REGION 1..214: note = omburtamab heavy chain CDR3
DIVMTQSPATLSVTPGDRVSLSCRASQSISDYLHWYQQKSHESPRLLIKYASQSISGIPSRFSGSGSGSDFTLSINSVEPEDVGVYYCQNGHSFPLTFGAGTKLELKRADAAPTVSIFPPSSEQLTSGGASVVCFLNNFYPKDINVKWKIDGSERQNGVLNSWTDQDSKDSTYSMSSTLTLTKDEYERHNSYTCEATHKTSTSPIVKSFNRNEC

SEQ ID NO: 6821 - protein, 107 aa, synthetic construct
  REGION 1..107: note = omburtamab light chain V region
DIVMTQSPATLSVTPGDRVSLSCRASQSISDYLHWYQQKSHESPRLLIKYASQSISGIPSRFSGSGSGSDFTLSINSVEPEDVGVYYCQNGHSFPLTFGAGTKLELK

SEQ ID NO: 6822 - protein, 6 aa, synthetic construct
  REGION 1..6: note = omburtamab light chain CDR1
QSISDY

SEQ ID NO: 6823 - skipped

SEQ ID NO: 6824 - protein, 9 aa, synthetic construct
  REGION 1..9: note = omburtamab light chain CDR3
QNGHSFPLT

SEQ ID NO: 6825 - protein, 125 aa, synthetic construct
  REGION 1..125: note = omodenbamab heavy chain V region
EVQLVESGGGLVQPGGSLRLSCAASGFTFSTYGMSWVRQAPGKGLEWVSSITGSGRSTFYADSVKGRFTISRDNSTNTLSLQMNSLRAEDTAVYYCARSPADIVTGYYPWWFDLWGQGTLVTVSS

SEQ ID NO: 6826 - protein, 8 aa, synthetic construct
  REGION 1..8: note = omodenbamab heavy chain CDR1
GFTFSTYG

SEQ ID NO: 6827 - protein, 8 aa, synthetic construct
  REGION 1..8: note = omodenbamab heavy chain CDR2
ITGSGRST

SEQ ID NO: 6828 - protein, 18 aa, synthetic construct
  REGION 1..18: note = omodenbamab heavy chain CDR3
ARSPADIVTGYYPWWFDL

SEQ ID NO: 6829 - protein, 107 aa, synthetic construct
  REGION 1..107: note = omodenbamab light chain V region
DIQMTQSPSSLSASIGDRVTITCRASQSINTYLNWYQQKPGKAPRLLIAGASSLQSGVPSRFSGSGSGTDFTLTISSLQPEDFATYYCQQANSFPLTFGQGTRLEIK

SEQ ID NO: 6830 - protein, 6 aa, synthetic construct
  REGION 1..6: note = omodenbamab light chain CDR1
QSINTY

SEQ ID NO: 6831 - skipped

SEQ ID NO: 6832 - protein, 9 aa, synthetic construct
  REGION 1..9: note = omodenbamab light chain CDR3
QQANSFPLT

SEQ ID NO: 6833 - protein, 116 aa, synthetic construct [sequence omitted]

SEQ ID NO: 6834 - protein, 8 aa, synthetic construct
  REGION 1..8: note = onfekafusp alfa heavy chain CDR1
GFTFSSFS

SEQ ID NO: 6835 - protein, 8 aa, synthetic construct
  REGION 1..8: note = onfekafusp alfa heavy chain CDR2
ISGSSGTT

SEQ ID NO: 6836 - protein, 9 aa, synthetic construct
  REGION 1..9: note = onfekafusp alfa heavy chain CDR3
AKPFPYFDY

SEQ ID NO: 6837 - protein, 108 aa, synthetic construct [sequence omitted]

SEQ ID NO: 6838 - protein, 7 aa, synthetic construct
  REGION 1..7: note = onfekafusp alfa light chain CDR1
QSVSSSF

SEQ ID NO: 6839 - skipped

SEQ ID NO: 6840 - protein, 9 aa, synthetic construct
  REGION 1..9: note = onfekafusp alfa light chain CDR3
QQTGRIPPT

SEQ ID NO: 6841 - protein, 124 aa, synthetic construct
  REGION 1..124: note = ontamalimab heavy chain V region
QVQLVQSGAEVKKPGASVKVSCKASGYTFTSYGINWVRQAPGQGLEWMGWISVYSGNTNYAQKVQGRVTMTADTSTSTAYMDLRSLRSDDTAVYYCAREGSSSSGDYYYGMDVWGQGTTVTVSS

SEQ ID NO: 6842 - protein, 8 aa, synthetic construct
  REGION 1..8: note = ontamalimab heavy chain CDR1
GYTFTSYG

SEQ ID NO: 6843 - protein, 8 aa, synthetic construct
  REGION 1..8: note = ontamalimab heavy chain CDR2
ISVYSGNT

SEQ ID NO: 6844 - protein, 17 aa, synthetic construct
  REGION 1..17: note = ontamalimab heavy chain CDR3
AREGSSSSGDYYYGMDV

SEQ ID NO: 6845 - protein, 112 aa, synthetic construct
  REGION 1..112: note = ontamalimab light chain V region
DIVMTQTPLSLSVTPGQPASISCKSSQSLLHTDGTTYLYWYLQKPGQPPQLLIYEVSNRFSGVPDRFSGSGSGTDFTLKISRVEAEDVGIYYCMQNIQLPWTFGQGTKVEIK

SEQ ID NO: 6846 - protein, 11 aa, synthetic construct
  REGION 1..11: note = ontamalimab light chain CDR1
QSLLHTDGTTY

SEQ ID NO: 6847 - skipped

SEQ ID NO: 6848 - protein, 9 aa, synthetic construct
  REGION 1..9: note = ontamalimab light chain CDR3
MQNIQLPWT

SEQ ID NO: 6849 - protein, 120 aa, synthetic construct
  REGION 1..120: note = onvatilimab heavy chain V region
QVQLVQSGAEVKKPGSSVKVSCKASGGTFSSYAISWVRQAPGQGLEWMGGIIPIFGTANYAQKFQGRVTITADESTSTAYMELSSLRSEDTAVYYCARSSYGWSYEFDYWGQGTLVTVSS

SEQ ID NO: 6850 - protein, 7 aa, synthetic construct
  REGION 1..7: note = onvatilimab heavy chain CDR1
GTFSSYA

SEQ ID NO: 6851 - protein, 8 aa, synthetic construct
  REGION 1..8: note = onvatilimab heavy chain CDR2
IIPIFGTA

SEQ ID NO: 6852 - protein, 13 aa, synthetic construct
  REGION 1..13: note = onvatilimab heavy chain CDR3
ARSSYGWSYEFDY

SEQ ID NO: 6853 - protein, 107 aa, synthetic construct
  REGION 1..107: note = onvatilimab light chain V region
DIQMTQSPSSLSASVGDRVTITCRASQSIDTRLNWYQQKPGKAPKLLIYSASSLQSGVPSRFSGSGSGTDFTLTISSLQPEDFATYYCQQSAYNPITFGQGTKVEIK

SEQ ID NO: 6854 - protein, 6 aa, synthetic construct
  REGION 1..6: note = onvatilimab light chain CDR1
QSIDTR

SEQ ID NO: 6855 - skipped

SEQ ID NO: 6856 - protein, 9 aa, synthetic construct
  REGION 1..9: note = onvatilimab light chain CDR3
QQSAYNPIT

SEQ ID NO: 6857 - protein, 118 aa, synthetic construct [sequence omitted]

SEQ ID NO: 6858 - protein, 8 aa, synthetic construct
  REGION 1..8: note = opicinumab heavy chain CDR1
GFTFSAYE

SEQ ID NO: 6859 - protein, 8 aa, synthetic construct
  REGION 1..8: note = opicinumab heavy chain CDR2
IGPSGGFT

SEQ ID NO: 6860 - protein, 11 aa, synthetic construct
  REGION 1..11: note = opicinumab heavy chain CDR3
ATEGDNDAFDI

SEQ ID NO: 6861 - protein, 108 aa, synthetic construct
  REGION 1..108: note = opicinumab light chain V region
DIQMTQSPATLSLSPGERATLSCRASQSVSSYLAWYQQKPGQAPRLLIYDASNRATGIPARFSGSGSGTDFTLTISSLEPEDFAVYYCQQRSNWPMYTFGQGTKLEIK

SEQ ID NO: 6862 - protein, 6 aa, synthetic construct
  REGION 1..6: note = opicinumab light chain CDR1
QSVSSY

SEQ ID NO: 6863 - skipped

SEQ ID NO: 6864 - protein, 10 aa, synthetic construct
  REGION 1..10: note = opicinumab light chain CDR3
QQRSNWPMYT

SEQ ID NO: 6865 - protein, 123 aa, synthetic construct
  REGION 1..123: note = opucolimab heavy chain V region
EVQLVQSGGGLVKPGGSLRLSCAASGFTFSSYTMNWVRQAPGKGLEWVSSISSGSDYLYYADSVKGRFTISRDNAKNSLYLQMNSLRAEDTAVYYCARNELRWYPQAGAFDRWGQGTMVTVSS

SEQ ID NO: 6866 - protein, 8 aa, synthetic construct
  REGION 1..8: note = opucolimab heavy chain CDR1
GFTFSSYT

SEQ ID NO: 6867 - protein, 8 aa, synthetic construct
  REGION 1..8: note = opucolimab heavy chain CDR2
ISSGSDYL

SEQ ID NO: 6868 - protein, 16 aa, synthetic construct
  REGION 1..16: note = opucolimab heavy chain CDR3
ARNELRWYPQAGAFDR

SEQ ID NO: 6869 - protein, 109 aa, synthetic construct
  REGION 1..109: note = opucolimab light chain V region
QSVVTQPPSMSAAPGQRVTISCSGSSSYIESSYVGWYQQLPGTAPRLLIYDDDMRPSGIPDRFSGSKSGTSATLAITGLQTGDEADYYCEIWRSGLGGVFGGGTKLTVL

SEQ ID NO: 6870 - protein, 9 aa, synthetic construct
  REGION 1..9: note = opucolimab light chain CDR1
SSYIESSYV

SEQ ID NO: 6871 - skipped

SEQ ID NO: 6872 - protein, 10 aa, synthetic construct
  REGION 1..10: note = opucolimab light chain CDR3
EIWRSGLGGV

SEQ ID NO: 6873 - protein, 118 aa, synthetic construct
  REGION 1..118: note = ordesekimab heavy chain V region
EVQLVQSGAEVKKPGESLKISCKVSGYFFTTYWIGWVRQMPGKGLEYMGIIYPGDSDTRYSPSFQGQVTISADKSISTAYLQWSSLKASDTAMYYCARGGNWNCFDYWGQGTLVTVSS

SEQ ID NO: 6874 - protein, 8 aa, synthetic construct
  REGION 1..8: note = ordesekimab heavy chain CDR1
GYFFTTYW

SEQ ID NO: 6875 - protein, 8 aa, synthetic construct
  REGION 1..8: note = ordesekimab heavy chain CDR2
IYPGDSDT

SEQ ID NO: 6876 - protein, 11 aa, synthetic construct
  REGION 1..11: note = ordesekimab heavy chain CDR3
ARGGNWNCFDY

SEQ ID NO: 6877 - protein, 106 aa, synthetic construct
  REGION 1..106: note = ordesekimab light chain V region
EIVLTQSPGTLSLSPGERATLSCRASQSVSSSYLAWYQQKPGQAPRLLIYGASRRATGIPDRFSGSGSGTDFTLTISRLEPEDFAVYYCQRYGSSHTFGQGTKLEI

SEQ ID NO: 6878 - protein, 7 aa, synthetic construct
  REGION 1..7: note = ordesekimab light chain CDR1
QSVSSSY

SEQ ID NO: 6879 - skipped

SEQ ID NO: 6880 - protein, 8 aa, synthetic construct
  REGION 1..8: note = ordesekimab light chain CDR3
QRYGSSHT

SEQ ID NO: 6881 - protein, 127 aa, synthetic construct
  REGION 1..127: note = ormutivimab heavy chain V region
QVQLVQSGAEVKKPGSSVKVSCKASGGTFNRYTVNWVRQAPGQGLEWMGGIIPIFGTANYAQRFQGRLTITADESTSTAYMELSSLRSDDTAVYFCARENLDNSGTYYYFSGWFDPWGQGTLVTVSS

SEQ ID NO: 6882 - protein, 8 aa, synthetic construct
  REGION 1..8: note = ormutivimab heavy chain CDR1
GGTFNRYT

SEQ ID NO: 6883 - protein, 8 aa, synthetic construct
  REGION 1..8: note = ormutivimab heavy chain CDR2
IIPIFGTA

SEQ ID NO: 6884 - protein, 20 aa, synthetic construct
  REGION 1..20: note = ormutivimab heavy chain CDR3
ARENLDNSGTYYYFSGWFDP

SEQ ID NO: 6885 - protein, 112 aa, synthetic construct
  REGION 1..112: note = ormutivimab light chain V region
QSALTQPRSVSGSPGQSVTISCTGTSSDIGGYNFVSWYQQHPGKAPKLMIYDATKRPSGVPDRFSGSKSGNTASLTISGLQAEDEADYYCCSYAGDYTPGVVFGGGTKLTVL

SEQ ID NO: 6886 - protein, 8 aa, synthetic construct
  REGION 1..8: note = ormutivimab light chain CDR1
SSDIGGYN

SEQ ID NO: 6887 - skipped

SEQ ID NO: 6888 - protein, 12 aa, synthetic construct
  REGION 1..12: note = ormutivimab light chain CDR3
CSYAGDYTPGVV

SEQ ID NO: 6889 - protein, 121 aa, synthetic construct
  REGION 1..121: note = orticumab heavy chain V region
EVQLLESGGGLVQPGGSLRLSCAASGFTFSNAWMSWVRQAPGKGLEWVSSISVGGHRTYYADSVKGRSTISRDNSKNTLYLQMNSLRAEDTAVYYCARIRVGPSGGAFDYWGQGTLVTVSS

SEQ ID NO: 6890 - protein, 8 aa, synthetic construct
  REGION 1..8: note = orticumab heavy chain CDR1
GFTFSNAW

SEQ ID NO: 6891 - protein, 8 aa, synthetic construct
  REGION 1..8: note = orticumab heavy chain CDR2
ISVGGHRT

SEQ ID NO: 6892 - protein, 14 aa, synthetic construct
  REGION 1..14: note = orticumab heavy chain CDR3
ARIRVGPSGGAFDY

SEQ ID NO: 6893 - protein, 110 aa, synthetic construct
  REGION 1..110: note = orticumab light chain V region
QSVLTQPPSASGTPGQRVTISCSGSNTNIGKNYVSWYQQLPGTAPKLLIYANSNRPSGVPDRFSGSKSGTSASLAISGLRSEDEADYYCASWDASLNGWVFGGGTKLTVL

SEQ ID NO: 6894 - protein, 8 aa, synthetic construct
  REGION 1..8: note = orticumab light chain CDR1
NTNIGKNY

SEQ ID NO: 6895 - skipped

SEQ ID NO: 6896 - protein, 7 aa, synthetic construct
  REGION 1..7: note = orticumab light chain CDR3
ASLNGWV

SEQ ID NO: 6897 - protein, 123 aa, synthetic construct
  REGION 1..123: note = orudokimab heavy chain V region
EVQLVETGGGLIQPGGSLRLSCAASGFTFSFYAMSWVRQAPGKGLEWVSAISGSGGSTYYADSVKGRFTISRDNSKNTLYLQMNSLRAEDTAVYYCARTIHGIRAAYDAFIIWGQGTLVTVSS

SEQ ID NO: 6898 - protein, 8 aa, synthetic construct
  REGION 1..8: note = orudokimab heavy chain CDR1
GFTFSFYA

SEQ ID NO: 6899 - protein, 8 aa, synthetic construct
  REGION 1..8: note = orudokimab heavy chain CDR2
ISGSGGST

SEQ ID NO: 6900 - protein, 16 aa, synthetic construct
  REGION 1..16: note = orudokimab heavy chain CDR3
ARTIHGIRAAYDAFII

SEQ ID NO: 6901 - protein, 108 aa, synthetic construct
  REGION 1..108: note = orudokimab light chain V region
EIVLTQSPGTLSLSPGERATLSCRASQSVGINLSWYQQKPGQAPRLLIYGASHRLTGIPDRFSGSGSGTDFTLTISRLEPEDFAVYYCHQYSQPPPFTFGGGTKVEIK

SEQ ID NO: 6902 - protein, 6 aa, synthetic construct
  REGION 1..6: note = orudokimab light chain CDR1
QSVGIN

SEQ ID NO: 6903 - skipped

SEQ ID NO: 6904 - protein, 10 aa, synthetic construct
  REGION 1..10: note = orudokimab light chain CDR3
HQYSQPPPFT

SEQ ID NO: 6905 - protein, 120 aa, synthetic construct
  REGION 1..120: note = osocimab heavy chain V region
EVQLLESGGGLVQPGGSLRLSCAASGFTFSQYGMDWVRQAPGKGLEWVSGIGPSGGSTVYADSVKGRFTISRDNSKNTLYLQMNSLRAEDTAVYYCTRGGPYYYYGMDVWGQGTTVTVSS

SEQ ID NO: 6906 - protein, 7 aa, synthetic construct
  REGION 1..7: note = osocimab heavy chain CDR1
GFTFSQY

SEQ ID NO: 6907 - protein, 9 aa, synthetic construct
  REGION 1..9: note = osocimab heavy chain CDR2
IGPSGGSTV

SEQ ID NO: 6908 - protein, 13 aa, synthetic construct
  REGION 1..13: note = osocimab heavy chain CDR3
TRGGPYYYYGMDV

SEQ ID NO: 6909 - protein, 107 aa, synthetic construct
  REGION 1..107: note = osocimab light chain V region
DIQMTQSPSSLSASVGDRVTITCQASQDISNYLNWYQQKPGKAPKLLIYDASNLETGVPSRFSGSGSGTDFTFTISSLQPEDIATYYCQQADSFPVTFGGGTKVEIK

SEQ ID NO: 6910 - protein, 6 aa, synthetic construct
  REGION 1..6: note = osocimab light chain CDR1
QDISNY

SEQ ID NO: 6911 - skipped

SEQ ID NO: 6912 - protein, 9 aa, synthetic construct
  REGION 1..9: note = osocimab light chain CDR3
QQADSFPVT

SEQ ID NO: 6913 - protein, 117 aa, synthetic construct [sequence omitted]

SEQ ID NO: 6914 - protein, 7 aa, synthetic construct
  REGION 1..7: note = otilimab heavy chain CDR1
GFTFSSY

SEQ ID NO: 6915 - protein, 10 aa, synthetic construct
  REGION 1..10: note = otilimab heavy chain CDR2
IENKYAGGAT

SEQ ID NO: 6916 - protein, 8 aa, synthetic construct
  REGION 1..8: note = otilimab heavy chain CDR3
ARGFGTDF

SEQ ID NO: 6917 - protein, 104 aa, synthetic construct [sequence omitted]

SEQ ID NO: 6918 - protein, 6 aa, synthetic construct
  REGION 1..6: note = otilimab light chain CDR1
SIGKKY

SEQ ID NO: 6919 - skipped

SEQ ID NO: 6920 - protein, 9 aa, synthetic construct
  REGION 1..9: note = otilimab light chain CDR3
SAWGDKGMV

SEQ ID NO: 6921 - protein, 120 aa, synthetic construct
  REGION 1..120: note = oxelumab heavy chain V region
EVQLLESGGGLVQPGGSLRLSCAASGFTFNSYAMSWVRQAPGKGLEWVSIISGSGGFTYYADSVKGRFTISRDNSRTTLYLQMNSLRAEDTAVYYCAKDRLVAPGTFDYWGQGALVTVSS

SEQ ID NO: 6922 - protein, 8 aa, synthetic construct
  REGION 1..8: note = oxelumab heavy chain CDR1
GFTFNSYA

SEQ ID NO: 6923 - protein, 8 aa, synthetic construct
  REGION 1..8: note = oxelumab heavy chain CDR2
ISGSGGFT

SEQ ID NO: 6924 - protein, 13 aa, synthetic construct
  REGION 1..13: note = oxelumab heavy chain CDR3
AKDRLVAPGTFDY

SEQ ID NO: 6925 - protein, 107 aa, synthetic construct
  REGION 1..107: note = oxelumab light chain V region
DIQMTQSPSSLSASVGDRVTITCRASQGISSWLAWYQQKPEKAPKSLIYAASSLQSGVPSRFSGSGSGTDFTLTISSLQPEDFATYYCQQYNSYPYTFGQGTKLEIK

SEQ ID NO: 6926 - protein, 6 aa, synthetic construct
  REGION 1..6: note = oxelumab light chain CDR1
QGISSW

SEQ ID NO: 6927 - skipped

SEQ ID NO: 6928 - protein, 9 aa, synthetic construct
  REGION 1..9: note = oxelumab light chain CDR3
QQYNSYPYT

SEQ ID NO: 6929 - protein, 116 aa, synthetic construct
  REGION 1..116: note = pacmilimab heavy chain V region
EVQLLESGGGLVQPGGSLRLSCAASGFTFSSYAMSWVRQAPGKGLEWVSSIWRNGIVTVYADSVKGRFTISRDNSKNTLYLQMNSLRAEDTAVYYCAKWSAAFDYWGQGTLVTVSS

SEQ ID NO: 6930 - protein, 8 aa, synthetic construct
  REGION 1..8: note = pacmilimab heavy chain CDR1
GFTFSSYA

SEQ ID NO: 6931 - protein, 8 aa, synthetic construct
  REGION 1..8: note = pacmilimab heavy chain CDR2
IWRNGIVT

SEQ ID NO: 6932 - protein, 9 aa, synthetic construct
  REGION 1..9: note = pacmilimab heavy chain CDR3
AKWSAAFDY

SEQ ID NO: 6933 - protein, 157 aa, synthetic construct
  REGION 1..157: note = pacmilimab light chain V region
QGQSGSGIALCPSHFCQLPQTGGGSSGGSGGSGGISSGLLSGRSDNHGGSDIQMTQSPSSLSASVGDRVTITCRASQSISSYLNWYQQKPGKAPKLLIYAASSLQSGVPSRFSGSGSGTDFTLTISSLQPEDFATYYCQQDNGYPSTFGGGTKVEIK

SEQ ID NO: 6934 - protein, 6 aa, synthetic construct
  REGION 1..6: note = pacmilimab light chain CDR1
QSISSY

SEQ ID NO: 6935 - skipped

SEQ ID NO: 6936 - protein, 9 aa, synthetic construct
  REGION 1..9: note = pacmilimab light chain CDR3
QQDNGYPST

SEQ ID NO: 6937 - protein, 120 aa, synthetic construct
  REGION 1..120: note = pamrevlumab heavy chain V region
EGQLVQSGGGLVHPGGSLRLSCAGSGFTFSSYGMHWVRQAPGKGLEWVSGIGTGGGTYSTDSVKGRFTISRDNAKNSLYLQMNSLRAEDMAVYYCARGDYYGSGSFFDCWGQGTLVTVSS

SEQ ID NO: 6938 - protein, 7 aa, synthetic construct
  REGION 1..7: note = pamrevlumab heavy chain CDR1
GFTFSSY

SEQ ID NO: 6939 - protein, 10 aa, synthetic construct
  REGION 1..10: note = pamrevlumab heavy chain CDR2
IGTGGGTYST

SEQ ID NO: 6940 - protein, 14 aa, synthetic construct
  REGION 1..14: note = pamrevlumab heavy chain CDR3
ARGDYYGSGSFFDC

SEQ ID NO: 6941 - protein, 107 aa, synthetic construct
  REGION 1..107: note = pamrevlumab light chain V region
DIQMTQSPSSLSASVGDRVTITCRASQGISSWLAWYQQKPEKAPKSLIYAASSLQSGVPSRFSGSGSGTDFTLTISSLQPEDFATYYCQQYNSYPPTFGQGTKLEIK

SEQ ID NO: 6942 - protein, 6 aa, synthetic construct
  REGION 1..6: note = pamrevlumab light chain CDR1
QGISSW

SEQ ID NO: 6943 - skipped

SEQ ID NO: 6944 - protein, 9 aa, synthetic construct
  REGION 1..9: note = pamrevlumab light chain CDR3
QQYNSYPPT

SEQ ID NO: 6945 - protein, 116 aa, synthetic construct
  REGION 1..116: note = panobacumab heavy chain V region
EEQVVESGGGFVQPGGSLRLSCAASGFTFSPYWMHWVRQAPGKGLVWVSRINSDGSTYYADSVKGRFTISRDNARNTLYLQMNSLRAEDTAVYYCARDRYYGPEMWGQGTMVTVSS

SEQ ID NO: 6946 - protein, 9 aa, synthetic construct
  REGION 1..9: note = panobacumab heavy chain CDR1
GFTFSPYWM

SEQ ID NO: 6947 - protein, 7 aa, synthetic construct
  REGION 1..7: note = panobacumab heavy chain CDR2
INSDGST

SEQ ID NO: 6948 - protein, 10 aa, synthetic construct
  REGION 1..10: note = panobacumab heavy chain CDR3
ARDRYYGPEM

SEQ ID NO: 6949 - protein, 112 aa, synthetic construct
  REGION 1..112: note = panobacumab light chain V region
DVVMTQSPLSLPVTLGQPASISCRSSQSLVYSDGNTYLNWFQQRPGQSPRRLIYKVSNRDSGVPDRFSGSGSGTDFTLKISRVEAEDVGVYYCMQGTHWPLTFGGGTKVEIK

SEQ ID NO: 6950 - protein, 11 aa, synthetic construct
  REGION 1..11: note = panobacumab light chain CDR1
QSLVYSDGNTY

SEQ ID NO: 6951 - skipped

SEQ ID NO: 6952 - protein, 9 aa, synthetic construct
  REGION 1..9: note = panobacumab light chain CDR3
MQGTHWPLT

SEQ ID NO: 6953 - protein, 117 aa, synthetic construct [sequence omitted]

SEQ ID NO: 6954 - protein, 8 aa, synthetic construct
  REGION 1..8: note = patritumab heavy chain CDR1
GGSFSGYY

SEQ ID NO: 6955 - protein, 7 aa, synthetic construct
  REGION 1..7: note = patritumab heavy chain CDR2
INHSGST

SEQ ID NO: 6956 - protein, 11 aa, synthetic construct
  REGION 1..11: note = patritumab heavy chain CDR3
ARDKWTWYFDL

SEQ ID NO: 6957 - protein, 113 aa, synthetic construct [sequence omitted]

SEQ ID NO: 6958 - protein, 12 aa, synthetic construct
  REGION 1..12: note = patritumab light chain CDR1
QSVLYSSSNRNY

SEQ ID NO: 6959 - skipped

SEQ ID NO: 6960 - protein, 9 aa, synthetic construct
  REGION 1..9: note = patritumab light chain CDR3
QQYYSTPRT

SEQ ID NO: 6961 - protein, 117 aa, synthetic construct [sequence omitted]

SEQ ID NO: 6962 - protein, 8 aa, synthetic construct
  REGION 1..8: note = patritumab deruxtecan heavy chain CDR1
GGSFSGYY

SEQ ID NO: 6963 - protein, 7 aa, synthetic construct
  REGION 1..7: note = patritumab deruxtecan heavy chain CDR2
INHSGST

SEQ ID NO: 6964 - protein, 11 aa, synthetic construct
  REGION 1..11: note = patritumab deruxtecan heavy chain CDR3
ARDKWTWYFDL

SEQ ID NO: 6965 - protein, 113 aa, synthetic construct [sequence omitted]

SEQ ID NO: 6966 - protein, 12 aa, synthetic construct
  REGION 1..12: note = patritumab deruxtecan light chain CDR1
QSVLYSSSNRNY

SEQ ID NO: 6967 - skipped

SEQ ID NO: 6968 - protein, 9 aa, synthetic construct
  REGION 1..9: note = patritumab deruxtecan light chain CDR3
QQYYSTPRT

SEQ ID NO: 6969 - protein, 123 aa, synthetic construct
  REGION 1..123: note = pelgifatamab corixetan heavy chain V region
QVQLVESGGGVVQPGRSLRLSCAASGFAFSRYGMHWVRQAPGKGLEWVAVIWYDGSNKYYADSVKGRFTISRDNSKNTQYLQMNSLRAEDTAVYYCARGGDFLYYYYYGMDVWGQGTTVTVSS

SEQ ID NO: 6970 - protein, 7 aa, synthetic construct
  REGION 1..7: note = pelgifatamab corixetan heavy chain CDR1
GFAFSRY

SEQ ID NO: 6971 - protein, 8 aa, synthetic construct
  REGION 1..8: note = pelgifatamab corixetan heavy chain CDR2
IWYDGSNK

SEQ ID NO: 6972 - protein, 16 aa, synthetic construct
  REGION 1..16: note = pelgifatamab corixetan heavy chain CDR3
ARGGDFLYYYYYGMDV

SEQ ID NO: 6973 - protein, 107 aa, synthetic construct
  REGION 1..107: note = pelgifatamab corixetan light chain V region
DIQMTQSPSSLSASVGDRVTITCRASQGISNYLAWYQQKTGKVPKFLIYEASTLQSGVPSRFSGGGSGTDFTLTISSLQPEDVATYYCQNYNSAPFTFGPGTKVDIK

SEQ ID NO: 6974 - protein, 6 aa, synthetic construct
  REGION 1..6: note = pelgifatamab corixetan light chain CDR1
QGISNY

SEQ ID NO: 6975 - skipped

SEQ ID NO: 6976 - protein, 9 aa, synthetic construct
  REGION 1..9: note = pelgifatamab corixetan light chain CDR3
QNYNSAPFT

SEQ ID NO: 6977 - protein, 120 aa, synthetic construct [sequence omitted]

SEQ ID NO: 6978 - protein, 8 aa, synthetic construct
  REGION 1..8: note = pembrolizumab heavy chain CDR1
GYTFTNYY

SEQ ID NO: 6979 - protein, 8 aa, synthetic construct
  REGION 1..8: note = pembrolizumab heavy chain CDR2
INPSNGGT

SEQ ID NO: 6980 - protein, 13 aa, synthetic construct
  REGION 1..13: note = pembrolizumab heavy chain CDR3
ARRDYRFDMGFDY

SEQ ID NO: 6981 - protein, 111 aa, synthetic construct [sequence omitted]

SEQ ID NO: 6982 - protein, 10 aa, synthetic construct
  REGION 1..10: note = pembrolizumab light chain CDR1
KGVSTSGYSY

SEQ ID NO: 6983 - skipped

SEQ ID NO: 6984 - protein, 9 aa, synthetic construct
  REGION 1..9: note = pembrolizumab light chain CDR3
QHSRDLPLT

SEQ ID NO: 6985 - protein, 119 aa, synthetic construct [sequence omitted]

SEQ ID NO: 6986 - protein, 8 aa, synthetic construct
  REGION 1..8: note = pertuzumab heavy chain CDR1
GFTFTDYT

SEQ ID NO: 6987 - protein, 8 aa, synthetic construct
  REGION 1..8: note = pertuzumab heavy chain CDR2
VNPNSGGS

SEQ ID NO: 6988 - protein, 12 aa, synthetic construct
  REGION 1..12: note = pertuzumab heavy chain CDR3
ARNLGPSFYFDY

SEQ ID NO: 6989 - protein, 107 aa, synthetic construct [sequence omitted]

SEQ ID NO: 6990 - protein, 6 aa, synthetic construct
  REGION 1..6: note = pertuzumab light chain CDR1
QDVSIG

SEQ ID NO: 6991 - skipped

SEQ ID NO: 6992 - protein, 9 aa, synthetic construct
  REGION 1..9: note = pertuzumab light chain CDR3
QQYYIYPYT

SEQ ID NO: 6993 - protein, 120 aa, synthetic construct
  REGION 1..120: note = petosemtamab heavy chain V region
QVQLVQSGSELKKPGASVKISCKASGYDFTNYAMNWVRQAPGHGLEWMGWINANTGDPTYAQGFTGRFVFSLDTSVSTAYLQISSLKAEDSAVYYCTRERFLEWLHFDYWGQGTLVTVSS

SEQ ID NO: 6994 - protein, 8 aa, synthetic construct
  REGION 1..8: note = petosemtamab heavy chain CDR1
GYDFTNYA

SEQ ID NO: 6995 - protein, 8 aa, synthetic construct
  REGION 1..8: note = petosemtamab heavy chain CDR2
INANTGDP

SEQ ID NO: 6996 - protein, 13 aa, synthetic construct
  REGION 1..13: note = petosemtamab heavy chain CDR3
TRERFLEWLHFDY

SEQ ID NO: 6997 - protein, 107 aa, synthetic construct
  REGION 1..107: note = petosemtamab light chain V region
DIQMTQSPSSLSASVGDRVTITCRASQSISSYLNWYQQKPGKAPKLLIYAASSLQSGVPSRFSGSGSGTDFTLTISSLQPEDFATYYCQQSYSTPPTFGQGTKVEIK

SEQ ID NO: 6998 - protein, 6 aa, synthetic construct
  REGION 1..6: note = petosemtamab light chain CDR1
QSISSY

SEQ ID NO: 6999 - skipped

SEQ ID NO: 7000 - protein, 9 aa, synthetic construct
  REGION 1..9: note = petosemtamab light chain CDR3
QQSYSTPPT

SEQ ID NO: 7001 - protein, 118 aa, synthetic construct
  REGION 1..118: note = pimivalimab heavy chain V region
QVQLVQSGAEVKKPGASVKVSCKASGYTFPSYYMHWVRQAPGQGLEWMGIINPEGGSTAYAQKFQGRVTMTRDTSTSTVYMELSSLRSEDTAVYYCARGGTYYDYTYWGQGTLVTVSS

SEQ ID NO: 7002 - protein, 8 aa, synthetic construct
  REGION 1..8: note = pimivalimab heavy chain CDR1
GYTFPSYY

SEQ ID NO: 7003 - protein, 8 aa, synthetic construct
  REGION 1..8: note = pimivalimab heavy chain CDR2
INPEGGST

SEQ ID NO: 7004 - protein, 11 aa, synthetic construct
  REGION 1..11: note = pimivalimab heavy chain CDR3
ARGGTYYDYTY

SEQ ID NO: 7005 - protein, 107 aa, synthetic construct
  REGION 1..107: note = pimivalimab light chain V region
DIQMTQSPSTLSASVGDRVTITCRASQSISSWLAWYQQKPGKAPKLLIYEASSLESGVPSRFSGSGSGTEFTLTISSLQPDDFATYYCQQYNSFPPTFGGGTKVEIK

SEQ ID NO: 7006 - protein, 6 aa, synthetic construct
  REGION 1..6: note = pimivalimab light chain CDR1
QSISSW

SEQ ID NO: 7007 - skipped

SEQ ID NO: 7008 - protein, 9 aa, synthetic construct
  REGION 1..9: note = pimivalimab light chain CDR3
QQYNSFPPT

SEQ ID NO: 7009 - protein, 117 aa, synthetic construct [sequence omitted]

SEQ ID NO: 7010 - protein, 8 aa, synthetic construct
  REGION 1..8: note = polatuzumab vedotin heavy chain CDR1
GYTFSSYW

SEQ ID NO: 7011 - protein, 8 aa, synthetic construct
  REGION 1..8: note = polatuzumab vedotin heavy chain CDR2
ILPGGGDT

SEQ ID NO: 7012 - protein, 10 aa, synthetic construct
  REGION 1..10: note = polatuzumab vedotin heavy chain CDR3
TRRVPIRLDY

SEQ ID NO: 7013 - protein, 111 aa, synthetic construct [sequence omitted]

SEQ ID NO: 7014 - protein, 10 aa, synthetic construct
  REGION 1..10: note = polatuzumab vedotin light chain CDR1
QSVDYEGDSF

SEQ ID NO: 7015 - skipped

SEQ ID NO: 7016 - protein, 9 aa, synthetic construct
  REGION 1..9: note = polatuzumab vedotin light chain CDR3
QQSNEDPLT

SEQ ID NO: 7017 - protein, 120 aa, synthetic construct
  REGION 1..120: note = ponsegromab heavy chain V region
QVQLVQSGAEVKKPGSSVKVSCKASGYTFSSYNIDWVRQAPGQGLEWMGGINPIFGTAFYNQKFQGRVTITADESTSTAYMELSSLRSEDTAVYYCAREAITTVGAMDHWGQGTLVTVSS

SEQ ID NO: 7018 - protein, 7 aa, synthetic construct
  REGION 1..7: note = ponsegromab heavy chain CDR1
GYTFSSY

SEQ ID NO: 7019 - protein, 8 aa, synthetic construct
  REGION 1..8: note = ponsegromab heavy chain CDR2
INPIFGTA

SEQ ID NO: 7020 - protein, 13 aa, synthetic construct
  REGION 1..13: note = ponsegromab heavy chain CDR3
AREAITTVGAMDH

SEQ ID NO: 7021 - protein, 107 aa, synthetic construct
  REGION 1..107: note = ponsegromab light chain V region
EIVLTQSPATLSLSPGERATLSCRTSQSVHNYLAWYQQKPGQAPRLLIYDASTRADGIPARFSGSGSGTDFTLTISSLEPEDFAVYYCQQFWSWPWTFGQGTKVEIK

SEQ ID NO: 7022 - protein, 6 aa, synthetic construct
  REGION 1..6: note = ponsegromab light chain CDR1
QSVHNY

SEQ ID NO: 7023 - skipped

SEQ ID NO: 7024 - protein, 9 aa, synthetic construct
  REGION 1..9: note = ponsegromab light chain CDR3
QQFWSWPWT

SEQ ID NO: 7025 - protein, 120 aa, synthetic construct
  REGION 1..120: note = pozelimab heavy chain V region
QVQLQESGPGLVKPSETLSLTCTVSGDSVSSSYWTWIRQPPGKGLEWIGYIYYSGSSNYNPSLKSRATISVDTSKNQFSLKLSSVTAADTAVYYCAREGNVDTTMIFDYWGQGTLVTVSS

SEQ ID NO: 7026 - protein, 8 aa, synthetic construct
  REGION 1..8: note = pozelimab heavy chain CDR1
GDSVSSSY

SEQ ID NO: 7027 - protein, 7 aa, synthetic construct
  REGION 1..7: note = pozelimab heavy chain CDR2
IYYSGSS

SEQ ID NO: 7028 - protein, 14 aa, synthetic construct
  REGION 1..14: note = pozelimab heavy chain CDR3
AREGNVDTTMIFDY

SEQ ID NO: 7029 - protein, 107 aa, synthetic construct
  REGION 1..107: note = pozelimab light chain V region
AIQMTQSPSSLSASVGDRVTITCRASQGIRNDLGWYQQKPGKAPKLLIYAASSLQSGVPSRFAGRGSGTDFTLTISSLQPEDFATYYCLQDFNYPWTFGQGTKVEIK

SEQ ID NO: 7030 - protein, 6 aa, synthetic construct
  REGION 1..6: note = pozelimab light chain CDR1
QGIRND

SEQ ID NO: 7031 - skipped

SEQ ID NO: 7032 - protein, 9 aa, synthetic construct
  REGION 1..9: note = pozelimab light chain CDR3
LQDFNYPWT

SEQ ID NO: 7033 - protein, 121 aa, synthetic construct
  REGION 1..121: note = prezalumab heavy chain V region
EVQLVESGGGLVQPGGSLRLSCAASGFTFSSYWMSWVRQAPGKGLEWVAYIKQDGNEKYYVDSVKGRFTISRDNAKNSLYLQMNSLRAEDTAVYYCAREGILWFGDLPTFWGQGTLVTVSS

SEQ ID NO: 7034 - protein, 7 aa, synthetic construct
  REGION 1..7: note = prezalumab heavy chain CDR1
GFTFSSY

SEQ ID NO: 7035 - protein, 8 aa, synthetic construct
  REGION 1..8: note = prezalumab heavy chain CDR2
IKQDGNEK

SEQ ID NO: 7036 - protein, 14 aa, synthetic construct
  REGION 1..14: note = prezalumab heavy chain CDR3
AREGILWFGDLPTF

SEQ ID NO: 7037 - protein, 107 aa, synthetic construct
  REGION 1..107: note = prezalumab light chain V region
DIQMTQSPSSLSASVGDRVTITCRASQGISNWLAWYQQKPEKAPKSLIYAASSLQSGVPSRFSGSGSGTDFTLTISSLQPEDFATYYCQQYDSYPRTFGQGTKVEIK

SEQ ID NO: 7038 - protein, 6 aa, synthetic construct
  REGION 1..6: note = prezalumab light chain CDR1
QGISNW

SEQ ID NO: 7039 - skipped

SEQ ID NO: 7040 - protein, 9 aa, synthetic construct
  REGION 1..9: note = prezalumab light chain CDR3
QQYDSYPRT

SEQ ID NO: 7041 - protein, 129 aa, synthetic construct
  REGION 1..129: note = prolgolimab heavy chain V region
QVQLVQSGGGLVQPGGSLRLSCAASGFTFSSYWMYWVRQVPGKGLEWVSAIDTGGGRTYYADSVKGRFAISRVNAKNTMYLQMNSLRAEDTAVYYCARDEGGGTGWGVLKDWPYGLDAWGQGTLVTVSS

SEQ ID NO: 7042 - protein, 7 aa, synthetic construct
  REGION 1..7: note = prolgolimab heavy chain CDR1
GFTFSSY

SEQ ID NO: 7043 - protein, 8 aa, synthetic construct
  REGION 1..8: note = prolgolimab heavy chain CDR2
IDTGGGRT

SEQ ID NO: 7044 - protein, 22 aa, synthetic construct
  REGION 1..22: note = prolgolimab heavy chain CDR3
ARDEGGGTGWGVLKDWPYGLDA

SEQ ID NO: 7045 - protein, 106 aa, synthetic construct
  REGION 1..106: note = prolgolimab light chain V region
QPVLTQPLSVSVALGQTARITCGGNNIGSKNVHWYQQKPGQAPVLVIYRDSNRPSGIPERFSGSNSGNTATLTISRAQAGDEADYYCQVWDSSTAVFGTGTKLTVL

SEQ ID NO: 7046 - protein, 6 aa, synthetic construct
  REGION 1..6: note = prolgolimab light chain CDR1
NIGSKN

SEQ ID NO: 7047 - skipped

SEQ ID NO: 7048 - protein, 9 aa, synthetic construct
  REGION 1..9: note = prolgolimab light chain CDR3
QVWDSSTAV

SEQ ID NO: 7049 - protein, 116 aa, synthetic construct [sequence omitted]

SEQ ID NO: 7050 - protein, 8 aa, synthetic construct
  REGION 1..8: note = pulocimab heavy chain CDR1
GFTFSSYS

SEQ ID NO: 7051 - protein, 8 aa, synthetic construct
  REGION 1..8: note = pulocimab heavy chain CDR2
ISSSSSYI

SEQ ID NO: 7052 - protein, 9 aa, synthetic construct
  REGION 1..9: note = pulocimab heavy chain CDR3
ARVTDAFDI

SEQ ID NO: 7053 - protein, 107 aa, synthetic construct
  REGION 1..107: note = pulocimab light chain V region
DIQMTQSPSSVSASIGDRVTITCRASQGLDNWLGWYQQKPGKAPKLLIYDASNLDTGVPSRFSGSGSGTYFTLTISSLQAEDFAVYFCQQAKAFPPTFGGGTKVDIK

SEQ ID NO: 7054 - protein, 6 aa, synthetic construct
  REGION 1..6: note = pulocimab light chain CDR1
QGLDNW

SEQ ID NO: 7055 - skipped

SEQ ID NO: 7056 - protein, 9 aa, synthetic construct
  REGION 1..9: note = pulocimab light chain CDR3
QQAKAFPPT

SEQ ID NO: 7057 - protein, 122 aa, synthetic construct
  REGION 1..122: note = quisovalimab heavy chain V region
QVQLQQWGAGLLKPSETLSLTCAVYGGSFSGYNWHWIRQPPGKGLEWIGEITHSGSTNYNPSLKSRVTISVDTSKNQFSLKLSSVTAADTAVYYCVREIAVAGTGYYGMDVWGQGTTVTVSS

SEQ ID NO: 7058 - protein, 8 aa, synthetic construct
  REGION 1..8: note = quisovalimab heavy chain CDR1
GGSFSGYN

SEQ ID NO: 7059 - protein, 7 aa, synthetic construct
  REGION 1..7: note = quisovalimab heavy chain CDR2
ITHSGST

SEQ ID NO: 7060 - protein, 16 aa, synthetic construct
  REGION 1..16: note = quisovalimab heavy chain CDR3
VREIAVAGTGYYGMDV

SEQ ID NO: 7061 - protein, 107 aa, synthetic construct
  REGION 1..107: note = quisovalimab light chain V region
AIQLTQSPSSLSASVGDRVTITCRASQGINSAFAWYQQKPGKAPKLLIYDASSLESGVPSRFSGSGSGTDFTLTISSLQPEDFATYYCQQFNSYPLTFGGGTKVEIK

SEQ ID NO: 7062 - protein, 6 aa, synthetic construct
  REGION 1..6: note = quisovalimab light chain CDR1
QGINSA

SEQ ID NO: 7063 - skipped

SEQ ID NO: 7064 - protein, 9 aa, synthetic construct
  REGION 1..9: note = quisovalimab light chain CDR3
QQFNSYPLT

SEQ ID NO: 7065 - protein, 121 aa, synthetic construct
  REGION 1..121: note = racotumomab heavy chain V region
QVQLQQSGAELVKPGASVKLSCKASGYTFTSYDINWVRQRPEQGLEWIGWIFPGDGSTKYNEKFKGKATLTTDKSSSTAYMQLSRLTSEDSAVYFCAREDYYDNSYYFDYWGQGTTLTVSS

SEQ ID NO: 7066 - protein, 8 aa, synthetic construct
  REGION 1..8: note = racotumomab heavy chain CDR1
GYTFTSYD

SEQ ID NO: 7067 - protein, 8 aa, synthetic construct
  REGION 1..8: note = racotumomab heavy chain CDR2
IFPGDGST

SEQ ID NO: 7068 - protein, 14 aa, synthetic construct
  REGION 1..14: note = racotumomab heavy chain CDR3
AREDYYDNSYYFDY

SEQ ID NO: 7069 - protein, 107 aa, synthetic construct
  REGION 1..107: note = racotumomab light chain V region
DIQMTQTTSSLSASLGDRVTISCRASQDISNYLNWYQQKPDGTVKLLIYYTSRLHSGVPSRFSGSGSGTDYSLTISNLEQEDIATYFCQQGNTLPWTFGGGTKLEIK

SEQ ID NO: 7070 - protein, 6 aa, synthetic construct
  REGION 1..6: note = racotumomab light chain CDR1
QDISNY

SEQ ID NO: 7071 - skipped

SEQ ID NO: 7072 - protein, 9 aa, synthetic construct
  REGION 1..9: note = racotumomab light chain CDR3
QQGNTLPWT

SEQ ID NO: 7073 - protein, 116 aa, synthetic construct [sequence omitted]

SEQ ID NO: 7074 - protein, 8 aa, synthetic construct
  REGION 1..8: note = radretumab heavy chain CDR1
GFTFSSFS

SEQ ID NO: 7075 - protein, 8 aa, synthetic construct
  REGION 1..8: note = radretumab heavy chain CDR2
ISGSSGTT

SEQ ID NO: 7076 - protein, 9 aa, synthetic construct
  REGION 1..9: note = radretumab heavy chain CDR3
AKPFPYFDY

SEQ ID NO: 7077 - protein, 108 aa, synthetic construct [sequence omitted]

SEQ ID NO: 7078 - protein, 7 aa, synthetic construct
  REGION 1..7: note = radretumab light chain CDR1
QSVSSSF

SEQ ID NO: 7079 - skipped

SEQ ID NO: 7080 - protein, 9 aa, synthetic construct
  REGION 1..9: note = radretumab light chain CDR3
QQTGRIPPT

SEQ ID NO: 7081 - protein, 127 aa, synthetic construct; identical to SEQ ID NO: 6881
  REGION 1..127: note = rafivirumab heavy chain V region

SEQ ID NO: 7082 - protein, 7 aa, synthetic construct
  REGION 1..7: note = rafivirumab heavy chain CDR1
GGTFNRY

SEQ ID NO: 7083 - protein, 8 aa, synthetic construct
  REGION 1..8: note = rafivirumab heavy chain CDR2
IIPIFGTA

SEQ ID NO: 7084 - protein, 20 aa, synthetic construct
  REGION 1..20: note = rafivirumab heavy chain CDR3
ARENLDNSGTYYYFSGWFDP

SEQ ID NO: 7085 - protein, 112 aa, synthetic construct; identical to SEQ ID NO: 6885
  REGION 1..112: note = rafivirumab light chain V region

SEQ ID NO: 7086 - protein, 9 aa, synthetic construct
  REGION 1..9: note = rafivirumab light chain CDR1
SSDIGGYNF

SEQ ID NO: 7087 - skipped

SEQ ID NO: 7088 - protein, 12 aa, synthetic construct
  REGION 1..12: note = rafivirumab light chain CDR3
CSYAGDYTPGVV

SEQ ID NO: 7089 - protein, 115 aa, synthetic construct
  REGION 1..115: note = ramucirumab heavy chain V region
VQLVQSGGGLVKPGGSLRLSCAASGFTFSSYSMNWVRQAPGKGLEWVSSISSSSSYIYYADSVKGRFTISRDNAKNSLYLQMNSLRAEDTAVYYCARVTDAFDIWGQGTMVTVSS

SEQ ID NO: 7090 - protein, 8 aa, synthetic construct
  REGION 1..8: note = ramucirumab heavy chain CDR1
GFTFSSYS

SEQ ID NO: 7091 - protein, 8 aa, synthetic construct
  REGION 1..8: note = ramucirumab heavy chain CDR2
ISSSSSYI

SEQ ID NO: 7092 - protein, 9 aa, synthetic construct
  REGION 1..9: note = ramucirumab heavy chain CDR3
ARVTDAFDI

SEQ ID NO: 7093 - protein, 107 aa, synthetic construct [sequence omitted]

SEQ ID NO: 7094 - protein, 6 aa, synthetic construct
  REGION 1..6: note = ramucirumab light chain CDR1
QGIDNW

SEQ ID NO: 7095 - skipped

SEQ ID NO: 7096 - protein, 9 aa, synthetic construct
  REGION 1..9: note = ramucirumab light chain CDR3
QQAKAFPPT

SEQ ID NO: 7097 - protein, 123 aa, synthetic construct [sequence omitted]

SEQ ID NO: 7098 - protein, 8 aa, synthetic construct
  REGION 1..8: note = ranibizumab heavy chain CDR1
GYDFTHYG

SEQ ID NO: 7099 - protein, 8 aa, synthetic construct
  REGION 1..8: note = ranibizumab heavy chain CDR2
INTYTGEP

SEQ ID NO: 7100 - protein, 16 aa, synthetic construct
  REGION 1..16: note = ranibizumab heavy chain CDR3
AKYPYYYGTSHWYFDV

SEQ ID NO: 7101 - protein, 107 aa, synthetic construct [sequence omitted]

SEQ ID NO: 7102 - protein, 6 aa, synthetic construct
  REGION 1..6: note = ranibizumab light chain CDR1
QDISNY

SEQ ID NO: 7103 - skipped

SEQ ID NO: 7104 - protein, 9 aa, synthetic construct
  REGION 1..9: note = ranibizumab light chain CDR3
QQYSTVPWT

SEQ ID NO: 7105 - protein, 122 aa, synthetic construct [sequence omitted]

SEQ ID NO: 7106 - protein, 7 aa, synthetic construct
  REGION 1..7: note = ravulizumab heavy chain CDR1
GHIFSNY

SEQ ID NO: 7107 - protein, 8 aa, synthetic construct
  REGION 1..8: note = ravulizumab heavy chain CDR2
ILPGSGHT

SEQ ID NO: 7108 - protein, 15 aa, synthetic construct
  REGION 1..15: note = ravulizumab heavy chain CDR3
ARYFFGSSPNWYFDV

SEQ ID NO: 7109 - protein, 107 aa, synthetic construct [sequence omitted]

SEQ ID NO: 7110 - protein, 6 aa, synthetic construct
  REGION 1..6: note = ravulizumab light chain CDR1
ENIYGA

SEQ ID NO: 7111 - skipped

SEQ ID NO: 7112 - protein, 9 aa, synthetic construct
  REGION 1..9: note = ravulizumab light chain CDR3
QNVLNTPLT

SEQ ID NO: 7113 - protein, 128 aa, synthetic construct; identical to SEQ ID NO: 460
  REGION 1..128: note = regdanvimab heavy chain V region

SEQ ID NO: 7114 - protein, 10 aa, synthetic construct
  REGION 1..10: note = regdanvimab heavy chain CDR1
GFSLSTSGVG

SEQ ID NO: 7115 - protein, 7 aa, synthetic construct
  REGION 1..7: note = regdanvimab heavy chain CDR2
IDWDDNK

SEQ ID NO: 7116 - protein, 20 aa, synthetic construct
  REGION 1..20: note = regdanvimab heavy chain CDR3
ARIPGFLRYRNRYYYYGMDV

SEQ ID NO: 7117 - protein, 110 aa, synthetic construct; identical to SEQ ID NO: 459
  REGION 1..110: note = regdanvimab light chain V region

SEQ ID NO: 7118 - protein, 8 aa, synthetic construct
  REGION 1..8: note = regdanvimab light chain CDR1
SSNIGNNY

SEQ ID NO: 7119 - skipped

SEQ ID NO: 7120 - protein, 11 aa, synthetic construct
  REGION 1..11: note = regdanvimab light chain CDR3
GTWDSSLSAGV

SEQ ID NO: 7121 - protein, 120 aa, synthetic construct
  REGION 1..120: note = relatlimab heavy chain V region
QVQLQQWGAGLLKPSETLSLTCAVYGGSFSDYYWNWIRQPPGKGLEWIGEINHRGSTNSNPSLKSRVTLSLDTSKNQFSLKLRSVTAADTAVYYCAFGYSDYEYNWFDPWGQGTLVTVSS

SEQ ID NO: 7122 - protein, 8 aa, synthetic construct
  REGION 1..8: note = relatlimab heavy chain CDR1
GGSFSDYY

SEQ ID NO: 7123 - protein, 7 aa, synthetic construct
  REGION 1..7: note = relatlimab heavy chain CDR2
INHRGST

SEQ ID NO: 7124 - protein, 14 aa, synthetic construct
  REGION 1..14: note = relatlimab heavy chain CDR3
AFGYSDYEYNWFDP

SEQ ID NO: 7125 - protein, 107 aa, synthetic construct
  REGION 1..107: note = relatlimab light chain V region
EIVLTQSPATLSLSPGERATLSCRASQSISSYLAWYQQKPGQAPRLLIYDASNRATGIPARFSGSGSGTDFTLTISSLEPEDFAVYYCQQRSNWPLTFGQGTNLEIK

SEQ ID NO: 7126 - protein, 6 aa, synthetic construct
  REGION 1..6: note = relatlimab light chain CDR1
QSISSY

SEQ ID NO: 7127 - skipped

SEQ ID NO: 7128 - protein, 9 aa, synthetic construct
  REGION 1..9: note = relatlimab light chain CDR3
QQRSNWPLT

SEQ ID NO: 7129 - protein, 121 aa, synthetic construct [sequence omitted]

SEQ ID NO: 7130 - protein, 8 aa, synthetic construct
  REGION 1..8: note = remtolumab heavy chain CDR1
GFTFDDYA

SEQ ID NO: 7131 - protein, 8 aa, synthetic construct
  REGION 1..8: note = remtolumab heavy chain CDR2
ITWNSGHI

SEQ ID NO: 7132 - protein, 14 aa, synthetic construct
  REGION 1..14: note = remtolumab heavy chain CDR3
AKVSYLSTASSLDY

SEQ ID NO: 7133 - protein, 107 aa, synthetic construct [sequence omitted]

SEQ ID NO: 7134 - protein, 6 aa, synthetic construct
  REGION 1..6: note = remtolumab light chain CDR1
QGIRNY

SEQ ID NO: 7135 - skipped

SEQ ID NO: 7136 - protein, 9 aa, synthetic construct
  REGION 1..9: note = remtolumab light chain CDR3
HQTDSLPYT

SEQ ID NO: 7137 - protein, 119 aa, synthetic construct; identical to SEQ ID NO: 5177
  REGION 1..119: note = retlirafusp alfa heavy chain V region

SEQ ID NO: 7138 - protein, 8 aa, synthetic construct
  REGION 1..8: note = retlirafusp alfa heavy chain CDR1
GYTFTSYW

SEQ ID NO: 7139 - protein, 8 aa, synthetic construct
  REGION 1..8: note = retlirafusp alfa heavy chain CDR2
IGPNSGFT

SEQ ID NO: 7140 - protein, 12 aa, synthetic construct
  REGION 1..12: note = retlirafusp alfa heavy chain CDR3
ARGGSSYDYFDY

SEQ ID NO: 7141 - protein, 111 aa, synthetic construct; identical to SEQ ID NO: 5181
  REGION 1..111: note = retlirafusp alfa light chain V region

SEQ ID NO: 7142 - protein, 10 aa, synthetic construct
  REGION 1..10: note = retlirafusp alfa light chain CDR1
ESVSIHGTHL

SEQ ID NO: 7143 - skipped

SEQ ID NO: 7144 - protein, 9 aa, synthetic construct
  REGION 1..9: note = retlirafusp alfa light chain CDR3
QQSFEDPLT

SEQ ID NO: 7145 - protein, 120 aa, synthetic construct
  REGION 1..120: note = rilotumumab heavy chain V region
QVQLQESGPGLVKPSETLSLTCTVSGGSISIYYWSWIRQPPGKGLEWIGYVYYSGSTNYNPSLKSRVTISVDTSKNQFSLKLNSVTAADTAVYYCARGGYDFWSGYFDYWGQGTLVTVSS

SEQ ID NO: 7146 - protein, 8 aa, synthetic construct
  REGION 1..8: note = rilotumumab heavy chain CDR1
GGSISIYY

SEQ ID NO: 7147 - protein, 7 aa, synthetic construct
  REGION 1..7: note = rilotumumab heavy chain CDR2
VYYSGST

SEQ ID NO: 7148 - protein, 14 aa, synthetic construct
  REGION 1..14: note = rilotumumab heavy chain CDR3
ARGGYDFWSGYFDY

SEQ ID NO: 7149 - protein, 108 aa, synthetic construct
  REGION 1..108: note = rilotumumab light chain V region
EIVMTQSPATLSVSPGERATLSCRASQSVDSNLAWYRQKPGQAPRLLIYGASTRATGIPARFSGSGSGTEFTLTISSLQSEDFAVYYCQQYINWPPITFGQGTRLEIK

SEQ ID NO: 7150 - protein, 6 aa, synthetic construct
  REGION 1..6: note = rilotumumab light chain CDR1
QSVDSN

SEQ ID NO: 7151 - skipped

SEQ ID NO: 7152 - protein, 10 aa, synthetic construct
  REGION 1..10: note = rilotumumab light chain CDR3
QQYINWPPIT

SEQ ID NO: 7153 - protein, 122 aa, synthetic construct
  REGION 1..122: note = rinucumab heavy chain V region
QLQLQESGPGLVKPSETLSLTCTVSGGSITSSSYYWGWIRQPPGKGLEWIGSIYYRGSTNYNPSLKSRVTISVDSSKNQFYLKVSSVTAVDTAVYYCARQNGAARPSWFDPWGQGTLVTVSS

SEQ ID NO: 7154 - protein, 10 aa, synthetic construct
  REGION 1..10: note = rinucumab heavy chain CDR1
GGSITSSSYY

SEQ ID NO: 7155 - protein, 8 aa, synthetic construct
  REGION 1..8: note = rinucumab heavy chain CDR2
IYYRGSTN

SEQ ID NO: 7156 - protein, 14 aa, synthetic construct
  REGION 1..14: note = rinucumab heavy chain CDR3
ARQNGAARPSWFDP

SEQ ID NO: 7157 - protein, 108 aa, synthetic construct
  REGION 1..108: note = rinucumab light chain V region
EIVLTQSPDTISLSPGERATLSCRASQSISSIYLAWYQQKPGQAPRLLIYGASSRVTGIPDRFSVSGSGTDFTLTISRLEPEDFAVYYCQHYGISPFTFGPGTKVDIR

SEQ ID NO: 7158 - protein, 7 aa, synthetic construct
  REGION 1..7: note = rinucumab light chain CDR1
QSISSIY

SEQ ID NO: 7159 - skipped

SEQ ID NO: 7160 - protein, 9 aa, synthetic construct
  REGION 1..9: note = rinucumab light chain CDR3
QHYGISPFT

SEQ ID NO: 7161 - protein, 120 aa, synthetic construct
  REGION 1..120: note = risankizumab heavy chain V region
QVQLVQSGAEVKKPGSSVKVSCKASGYTFTDQTIHWMRQAPGQGLEWIGYIYPRDDSPKYNENFKGKVTITADKSTSTAYMELSSLRSEDTAVYYCAIPDRSGYAWFIYWGQGTLVTVSS

SEQ ID NO: 7162 - protein, 8 aa, synthetic construct
  REGION 1..8: note = risankizumab heavy chain CDR1
GYTFTDQT

SEQ ID NO: 7163 - protein, 8 aa, synthetic construct
  REGION 1..8: note = risankizumab heavy chain CDR2
IYPRDDSP

SEQ ID NO: 7164 - protein, 13 aa, synthetic construct
  REGION 1..13: note = risankizumab heavy chain CDR3
AIPDRSGYAWFIY

SEQ ID NO: 7165 - protein, 107 aa, synthetic construct
  REGION 1..107: note = risankizumab light chain V region
DIQMTQSPSSLSASVGDRVTITCKASRDVAIAVAWYQQKPGKVPKLLIYWASTRHTGVPSRFSGSGSRTDFTLTISSLQPEDVADYFCHQYSSYPFTFGSGTKLEIK

SEQ ID NO: 7166 - protein, 6 aa, synthetic construct
  REGION 1..6: note = risankizumab light chain CDR1
RDVAIA

SEQ ID NO: 7167 - skipped

SEQ ID NO: 7168 - protein, 9 aa, synthetic construct
  REGION 1..9: note = risankizumab light chain CDR3
HQYSSYPFT

SEQ ID NO: 7169 - protein, 120 aa, synthetic construct
  REGION 1..120: note = rituximab heavy chain V region
QVQLQQPGAELVKPGASVKMSCKASGYTFTSYNMHWVKQTPGRGLEWIGAIYPGNGDTSYNQKFKGKATLTADKSSSTAYMQLSSLTSEDSAVYYCARSTYYGGDWYFNVWGAGTTVTVS

SEQ ID NO: 7170 - protein, 8 aa, synthetic construct
  REGION 1..8: note = rituximab heavy chain CDR1
GYTFTSYN

SEQ ID NO: 7171 - protein, 8 aa, synthetic construct
  REGION 1..8: note = rituximab heavy chain CDR2
IYPGNGDT

SEQ ID NO: 7172 - protein, 14 aa, synthetic construct
  REGION 1..14: note = rituximab heavy chain CDR3
ARSTYYGGDWYFNV

SEQ ID NO: 7173 - protein, 106 aa, synthetic construct [sequence omitted]

SEQ ID NO: 7174 - protein, 5 aa, synthetic construct
  REGION 1..5: note = rituximab light chain CDR1
SSVSY

SEQ ID NO: 7175 - skipped

SEQ ID NO: 7176 - protein, 9 aa, synthetic construct
  REGION 1..9: note = rituximab light chain CDR3
QQWTSNPPT

SEQ ID NO: 7177 - protein, 118 aa, synthetic construct [sequence omitted]

SEQ ID NO: 7178 - protein, 8 aa, synthetic construct
  REGION 1..8: note = robatumumab heavy chain CDR1
GFTFSSFA

SEQ ID NO: 7179 - protein, 8 aa, synthetic construct
  REGION 1..8: note = robatumumab heavy chain CDR2
IDTRGATY

SEQ ID NO: 7180 - protein, 12 aa, synthetic construct
  REGION 1..12: note = robatumumab heavy chain CDR3
ARLGNFYYGMDV

SEQ ID NO: 7181 - protein, 107 aa, synthetic construct [sequence omitted]

SEQ ID NO: 7182 - protein, 6 aa, synthetic construct
  REGION 1..6: note = robatumumab light chain CDR1
QSIGSS

SEQ ID NO: 7183 - skipped

SEQ ID NO: 7184 - protein, 9 aa, synthetic construct
  REGION 1..9: note = robatumumab light chain CDR3
HQSSRLPHT

SEQ ID NO: 7185 - protein, 117 aa, synthetic construct
  REGION 1..117: note = rocatinlimab heavy chain V region
QITLKESGPTLVKPKQTLTLTCTFSGFSLSTSGMGVGWIRQPPGKALEWLAVIYWDDHQLYSPSLKSRLTITKDTSKNQVVLTMTNMDPVDTATYYCAHRRGAFQHWGQGTLVTVSS

SEQ ID NO: 7186 - protein, 10 aa, synthetic construct
  REGION 1..10: note = rocatinlimab heavy chain CDR1
GFSLSTSGMG

SEQ ID NO: 7187 - protein, 7 aa, synthetic construct
  REGION 1..7: note = rocatinlimab heavy chain CDR2
IYWDDHQ

SEQ ID NO: 7188 - protein, 9 aa, synthetic construct
  REGION 1..9: note = rocatinlimab heavy chain CDR3
AHRRGAFQH

SEQ ID NO: 7189 - protein, 107 aa, synthetic construct
  REGION 1..107: note = rocatinlimab light chain V region
EIVLTQSPGTLSLSPGERATLSCRASQSVSSSYLAWYQQKPGQAPRLLIYGASSRATGIPDRFSGSGSGTDFTLTISRLEPEDFAVYYCQQYDSSLTFGGGTKVEIK

SEQ ID NO: 7190 - protein, 7 aa, synthetic construct
  REGION 1..7: note = rocatinlimab light chain CDR1
QSVSSSY

SEQ ID NO: 7191 - skipped

SEQ ID NO: 7192 - protein, 7 aa, synthetic construct
  REGION 1..7: note = rocatinlimab light chain CDR3
QQYDSSL

SEQ ID NO: 7193 - protein, 126 aa, synthetic construct
  REGION 1..126: note = roledumab heavy chain V region
QVQLVESGGGVVQPGRSLRLSCTASGFTFKNYAMHWVRQAPAKGLEWVATISYDGRNIQYADSVKGRFTFSRDNSQDTLYLQLNSLRPEDTAVYYCARPVRSRWLQLGLEDAFHIWGQGTMVTVSS

SEQ ID NO: 7194 - protein, 7 aa, synthetic construct
  REGION 1..7: note = roledumab heavy chain CDR1
GFTFKNY

SEQ ID NO: 7195 - protein, 8 aa, synthetic construct
  REGION 1..8: note = roledumab heavy chain CDR2
ISYDGRNI

SEQ ID NO: 7196 - protein, 19 aa, synthetic construct
  REGION 1..19: note = roledumab heavy chain CDR3
ARPVRSRWLQLGLEDAFHI

SEQ ID NO: 7197 - protein, 106 aa, synthetic construct
  REGION 1..106: note = roledumab light chain V region
AIRMTQSPSSFSASTGDRVTITCRASQDIRNYVAWYQQKSGKAPKFLIYAASTLQSGVPSRFSGSGSGTDFTLTINSLQSEDFATYYCQQYYNSPPTFGQGTRVEI

SEQ ID NO: 7198 - protein, 6 aa, synthetic construct
  REGION 1..6: note = roledumab light chain CDR1
QDIRNY

SEQ ID NO: 7199 - skipped

SEQ ID NO: 7200 - protein, 9 aa, synthetic construct
  REGION 1..9: note = roledumab light chain CDR3
QQYYNSPPT

SEQ ID NO: 7201 - protein, 119 aa, synthetic construct
  REGION 1..119: note = romlusevimab heavy chain V region
QVQLVQSGSELKKPGASVKVSCKASGYTFTTYVMNWVRQAPGQGLEWMGWINTNTGNPTYAQGFTGRFVFSLDTSVSTASLQISSLKAEDTAVYYCSSEITTLGGMDVWGQGTTVTVSS

SEQ ID NO: 7202 - protein, 8 aa, synthetic construct
  REGION 1..8: note = romlusevimab heavy chain CDR1
GYTFTTYV

SEQ ID NO: 7203 - protein, 8 aa, synthetic construct
  REGION 1..8: note = romlusevimab heavy chain CDR2
INTNTGNP

SEQ ID NO: 7204 - protein, 12 aa, synthetic construct
  REGION 1..12: note = romlusevimab heavy chain CDR3
SSEITTLGGMDV

SEQ ID NO: 7205 - protein, 108 aa, synthetic construct
  REGION 1..108: note = romlusevimab light chain V region
SYVLTQPPSVSVAPGKTARITCGGNNIGSKSVHWYQQKPGQAPVLVIYYDSDRPSGIPERFSGSNSGNTATLTISGVEAGDEADYYCQVWDSISDHRVFGGGTKLTVL

SEQ ID NO: 7206 - protein, 6 aa, synthetic construct
  REGION 1..6: note = romlusevimab light chain CDR1
NIGSKS

SEQ ID NO: 7207 - skipped

SEQ ID NO: 7208 - protein, 11 aa, synthetic construct
  REGION 1..11: note = romlusevimab light chain CDR3
QVWDSISDHRV

SEQ ID NO: 7209 - protein, 123 aa, synthetic construct [sequence omitted]

SEQ ID NO: 7210 - protein, 8 aa, synthetic construct
  REGION 1..8: note = romosozumab heavy chain CDR1
GYTFTDYN

SEQ ID NO: 7211 - protein, 8 aa, synthetic construct
  REGION 1..8: note = romosozumab heavy chain CDR2
INPNSGGA

SEQ ID NO: 7212 - protein, 16 aa, synthetic construct
  REGION 1..16: note = romosozumab heavy chain CDR3
ARLGYDDIYDDWYFDV

SEQ ID NO: 7213 - protein, 107 aa, synthetic construct [sequence omitted]

SEQ ID NO: 7214 - protein, 6 aa, synthetic construct
  REGION 1..6: note = romosozumab light chain CDR1
QDISNY

SEQ ID NO: 7215 - skipped

SEQ ID NO: 7216 - protein, 9 aa, synthetic construct
  REGION 1..9: note = romosozumab light chain CDR3
QQGDTLPYT

SEQ ID NO: 7217 - protein, 117 aa, synthetic construct
  REGION 1..117: note = rosmantuzumab heavy chain V region
QVQLVQSGAEVKKPGASVKVSCKASGYTFTDYSIHWVRQAPGQGLEWIGYIYPSNGDSGYNQKFKNRVTMTRDTSTSTAYMELSRLRSEDTAVYYCATYFANNFDYWGQGTTLTVSS

SEQ ID NO: 7218 - protein, 8 aa, synthetic construct
  REGION 1..8: note = rosmantuzumab heavy chain CDR1
GYTFTDYS

SEQ ID NO: 7219 - protein, 8 aa, synthetic construct
  REGION 1..8: note = rosmantuzumab heavy chain CDR2
IYPSNGDS

SEQ ID NO: 7220 - protein, 10 aa, synthetic construct
  REGION 1..10: note = rosmantuzumab heavy chain CDR3
ATYFANNFDY

SEQ ID NO: 7221 - protein, 111 aa, synthetic construct
  REGION 1..111: note = rosmantuzumab light chain V region
DIQMTQSPSSLSASVGDRVTITCKASQSVDYDGDSYMNWYQQKPGKAPKLLIYAASNLESGVPSRFSGSGSGTDFTLTISPVQAEDFATYYCQQSNEDPLTFGAGTKLELK

SEQ ID NO: 7222 - protein, 10 aa, synthetic construct
  REGION 1..10: note = rosmantuzumab light chain CDR1
QSVDYDGDSY

SEQ ID NO: 7223 - skipped

SEQ ID NO: 7224 - protein, 9 aa, synthetic construct
  REGION 1..9: note = rosmantuzumab light chain CDR3
QQSNEDPLT

SEQ ID NO: 7225 - protein, 121 aa, synthetic construct; identical to SEQ ID NO: 7033
  REGION 1..121: note = rozibafusp alfa heavy chain V region

SEQ ID NO: 7226 - protein, 7 aa, synthetic construct
  REGION 1..7: note = rozibafusp alfa heavy chain CDR1
GFTFSSY

SEQ ID NO: 7227 - protein, 8 aa, synthetic construct
  REGION 1..8: note = rozibafusp alfa heavy chain CDR2
IKQDGNEK

SEQ ID NO: 7228 - protein, 14 aa, synthetic construct
  REGION 1..14: note = rozibafusp alfa heavy chain CDR3
AREGILWFGDLPTF

SEQ ID NO: 7229 - protein, 107 aa, synthetic construct; identical to SEQ ID NO: 7037
  REGION 1..107: note = rozibafusp alfa light chain V region

SEQ ID NO: 7230 - protein, 6 aa, synthetic construct
  REGION 1..6: note = rozibafusp alfa light chain CDR1
QGISNW

SEQ ID NO: 7231 - skipped

SEQ ID NO: 7232 - protein, 9 aa, synthetic construct
  REGION 1..9: note = rozibafusp alfa light chain CDR3
QQYDSYPRT

SEQ ID NO: 7233 - protein, 121 aa, synthetic construct
  REGION 1..121: note = sacituzumab govitecan heavy chain V region
QVQLQQSGSELKKPGASVKVSCKASGYTFTNYGMNWVKQAPGQGLKWMGWINTYTGEPTYTDDFKGRFAFSLDTSVSTAYLQISSLKADDTAVYFCARGGFGSSYWYFDVWGQGSLVTVSS

SEQ ID NO: 7234 - protein, 8 aa, synthetic construct
  REGION 1..8: note = sacituzumab govitecan heavy chain CDR1
GYTFTNYG

SEQ ID NO: 7235 - protein, 8 aa, synthetic construct
  REGION 1..8: note = sacituzumab govitecan heavy chain CDR2
INTYTGEP

SEQ ID NO: 7236 - protein, 14 aa, synthetic construct
  REGION 1..14: note = sacituzumab govitecan heavy chain CDR3
ARGGFGSSYWYFDV

SEQ ID NO: 7237 - protein, 107 aa, synthetic construct
  REGION 1..107: note = sacituzumab govitecan light chain V region
DIQLTQSPSSLSASVGDRVSITCKASQDVSIAVAWYQQKPGKAPKLLIYSASYRYTGVPDRFSGSGSGTDFTLTISSLQPEDFAVYYCQQHYITPLTFGAGTKVEIK

SEQ ID NO: 7238 - protein, 6 aa, synthetic construct
  REGION 1..6: note = sacituzumab govitecan light chain CDR1
QDVSIA

SEQ ID NO: 7239 - skipped

SEQ ID NO: 7240 - protein, 9 aa, synthetic construct
  REGION 1..9: note = sacituzumab govitecan light chain CDR3
QQHYITPLT

SEQ ID NO: 7241 - protein, 116 aa, synthetic construct
  REGION 1..116: note = sarilumab heavy chain V region
EVQLVESGGGLVQPGRSLRLSCAASRFTFDDYAMHWVRQAPGKGLEWVSGISWNSGRIGYADSVKGRFTISRDNAENSLFLQMNGLRAEDTALYYCAKGRDSFDIWGQGTMVTVSS

SEQ ID NO: 7242 - protein, 8 aa, synthetic construct
  REGION 1..8: note = sarilumab heavy chain CDR1
RFTFDDYA

SEQ ID NO: 7243 - protein, 8 aa, synthetic construct
  REGION 1..8: note = sarilumab heavy chain CDR2
ISWNSGRI

SEQ ID NO: 7244 - protein, 9 aa, synthetic construct
  REGION 1..9: note = sarilumab heavy chain CDR3
AKGRDSFDI

SEQ ID NO: 7245 - protein, 107 aa, synthetic construct
  REGION 1..107: note = sarilumab light chain V region
DIQMTQSPSSVSASVGDRVTITCRASQGISSWLAWYQQKPGKAPKLLIYGASSLESGVPSRFSGSGSGTDFTLTISSLQPEDFASYYCQQANSFPYTFGQGTKLEIK

SEQ ID NO: 7246 - protein, 6 aa, synthetic construct
  REGION 1..6: note = sarilumab light chain CDR1
QGISSW

SEQ ID NO: 7247 - skipped

SEQ ID NO: 7248 - protein, 9 aa, synthetic construct
  REGION 1..9: note = sarilumab light chain CDR3
QQANSFPYT

SEQ ID NO: 7249 - protein, 119 aa, synthetic construct
  REGION 1..119: note = satralizumab heavy chain V region
QVQLQESGPGLVKPSETLSLTCAVSGHSISHDHAWSWVRQPPGEGLEWIGFISYSGITNYNPSLQGRVTISRDNSKNTLYLQMNSLRAEDTAVYYCARSLARTTAMDYWGEGTLVTVSS

SEQ ID NO: 7250 - protein, 9 aa, synthetic construct
  REGION 1..9: note = satralizumab heavy chain CDR1
GHSISHDHA

SEQ ID NO: 7251 - protein, 7 aa, synthetic construct
  REGION 1..7: note = satralizumab heavy chain CDR2
ISYSGIT

SEQ ID NO: 7252 - protein, 12 aa, synthetic construct
  REGION 1..12: note = satralizumab heavy chain CDR3
ARSLARTTAMDY

SEQ ID NO: 7253 - protein, 107 aa, synthetic construct
  REGION 1..107: note = satralizumab light chain V region
DIQMTQSPSSLSASVGDSVTITCQASTDISSHLNWYQQKPGKAPELLIYYGSHLLSGVPSRFSGSGSGTDFTFTISSLEAEDAATYYCGQGNRLPYTFGQGTKVEIE

SEQ ID NO: 7254 - protein, 6 aa, synthetic construct
  REGION 1..6: note = satralizumab light chain CDR1
TDISSH

SEQ ID NO: 7255 - skipped

SEQ ID NO: 7256 - protein, 9 aa, synthetic construct
  REGION 1..9: note = satralizumab light chain CDR3
GQGNRLPYT

SEQ ID NO: 7257 - protein, 127 aa, synthetic construct [sequence omitted]

SEQ ID NO: 7258 - protein, 8 aa, synthetic construct
  REGION 1..8: note = secukinumab heavy chain CDR1
GFTFSNYW

SEQ ID NO: 7259 - protein, 8 aa, synthetic construct
  REGION 1..8: note = secukinumab heavy chain CDR2
INQDGSEK

SEQ ID NO: 7260 - protein, 20 aa, synthetic construct [sequence omitted]

SEQ ID NO: 7261 - protein, 108 aa, synthetic construct [sequence omitted]

SEQ ID NO: 7262 - protein, 7 aa, synthetic construct
  REGION 1..7: note = secukinumab light chain CDR1
QSVSSSY

SEQ ID NO: 7263 - skipped

SEQ ID NO: 7264 - protein, 9 aa, synthetic construct
  REGION 1..9: note = secukinumab light chain CDR3
QQYGSSPCT

SEQ ID NO: 7265 - protein, 126 aa, synthetic construct
  REGION 1..126: note = selicrelumab heavy chain V region
QVQLVQSGAEVKKPGASVKVSCKASGYTFTGYYMHWVRQAPGQGLEWMGWINPDSGGTNYAQKFQGRVTMTRDTSISTAYMELNRLRSDDTAVYYCARDQPLGYCTNGVCSYFDYWGQGTLVTVSS

SEQ ID NO: 7266 - protein, 8 aa, synthetic construct
  REGION 1..8: note = selicrelumab heavy chain CDR1
GYTFTGYY

SEQ ID NO: 7267 - protein, 8 aa, synthetic construct
  REGION 1..8: note = selicrelumab heavy chain CDR2
INPDSGGT

SEQ ID NO: 7268 - protein, 19 aa, synthetic construct
  REGION 1..19: note = selicrelumab heavy chain CDR3
ARDQPLGYCTNGVCSYFDY

SEQ ID NO: 7269 - protein, 107 aa, synthetic construct
  REGION 1..107: note = selicrelumab light chain V region
DIQMTQSPSSVSASVGDRVTITCRASQGIYSWLAWYQQKPGKAPNLLIYTASTLQSGVPSRFSGSGSGTDFTLTISSLQPEDFATYYCQQANIFPLTFGGGTKVEIK

SEQ ID NO: 7270 - protein, 7 aa, synthetic construct
  REGION 1..7: note = selicrelumab light chain CDR1
QGIYSWL

SEQ ID NO: 7271 - skipped

SEQ ID NO: 7272 - protein, 9 aa, synthetic construct
  REGION 1..9: note = selicrelumab light chain CDR3
QQANIFPLT

SEQ ID NO: 7273 - protein, 119 aa, synthetic construct [sequence omitted]

SEQ ID NO: 7274 - protein, 8 aa, synthetic construct
  REGION 1..8: note = seribantumab heavy chain CDR1
GFTFSHYV

SEQ ID NO: 7275 - protein, 8 aa, synthetic construct
  REGION 1..8: note = seribantumab heavy chain CDR2
ISSSGGWT

SEQ ID NO: 7276 - protein, 12 aa, synthetic construct
  REGION 1..12: note = seribantumab heavy chain CDR3
TRGLKMATIFDY

SEQ ID NO: 7277 - protein, 111 aa, synthetic construct [sequence omitted]

SEQ ID NO: 7278 - protein, 8 aa, synthetic construct
  REGION 1..8: note = seribantumab light chain CDR1
SSDVGSYN

SEQ ID NO: 7279 - skipped

SEQ ID NO: 7280 - protein, 10 aa, synthetic construct
  REGION 1..10: note = seribantumab light chain CDR3
SYAGSSIFVI

SEQ ID NO: 7281 - protein, 117 aa, synthetic construct
  REGION 1..117: note = setrusumab heavy chain V region
QVQLVESGGGLVQPGGSLRLSCAASGFTFRSHWLSWVRQAPGKGLEWVSNINYDGSSTYYADSVKGRFTISRDNSKNTLYLQMNSLRAEDTAVYYCARDTYLHFDYWGQGTLVTVSS

SEQ ID NO: 7282 - protein, 8 aa, synthetic construct
  REGION 1..8: note = setrusumab heavy chain CDR1
GFTFRSHW

SEQ ID NO: 7283 - protein, 8 aa, synthetic construct
  REGION 1..8: note = setrusumab heavy chain CDR2
INYDGSST

SEQ ID NO: 7284 - protein, 10 aa, synthetic construct
  REGION 1..10: note = setrusumab heavy chain CDR3
ARDTYLHFDY

SEQ ID NO: 7285 - protein, 111 aa, synthetic construct
  REGION 1..111: note = setrusumab light chain V region
DIALTQPASVSGSPGQSITISCTGTSSDVGDINDVSWYQQHPGKAPKLMIYDVNNRPSGVSNRFSGSKSGNTASLTISGLQAEDEADYYCQSYAGSYLSEVFGGGTKLTVL

SEQ ID NO: 7286 - protein, 9 aa, synthetic construct
  REGION 1..9: note = setrusumab light chain CDR1
SSDVGDIND

SEQ ID NO: 7287 - skipped

SEQ ID NO: 7288 - protein, 11 aa, synthetic construct
  REGION 1..11: note = setrusumab light chain CDR3
QSYAGSYLSEV

SEQ ID NO: 7289 - protein, 116 aa, synthetic construct [sequence omitted]

SEQ ID NO: 7290 - protein, 8 aa, synthetic construct
  REGION 1..8: note = sifalimumab heavy chain CDR1
GYTFTSYS

SEQ ID NO: 7291 - protein, 8 aa, synthetic construct
  REGION 1..8: note = sifalimumab heavy chain CDR2
ISVYNGNT

SEQ ID NO: 7292 - protein, 9 aa, synthetic construct
  REGION 1..9: note = sifalimumab heavy chain CDR3
ARDPIAAGY

SEQ ID NO: 7293 - protein, 108 aa, synthetic construct [sequence omitted]

SEQ ID NO: 7294 - protein, 7 aa, synthetic construct
  REGION 1..7: note = sifalimumab light chain CDR1
QSVSSTY

SEQ ID NO: 7295 - skipped

SEQ ID NO: 7296 - protein, 9 aa, synthetic construct
  REGION 1..9: note = sifalimumab light chain CDR3
QQYGSSPRT

SEQ ID NO: 7297 - protein, 119 aa, synthetic construct [sequence omitted]

SEQ ID NO: 7298 - protein, 8 aa, synthetic construct
  REGION 1..8: note = siltuximab heavy chain CDR1
GFTFSSFA

SEQ ID NO: 7299 - protein, 8 aa, synthetic construct
  REGION 1..8: note = siltuximab heavy chain CDR2
ISSGGSYT

SEQ ID NO: 7300 - protein, 12 aa, synthetic construct
  REGION 1..12: note = siltuximab heavy chain CDR3
ARGLWGYYALDY

SEQ ID NO: 7301 - protein, 106 aa, synthetic construct [sequence omitted]

SEQ ID NO: 7302 - protein, 5 aa, synthetic construct
  REGION 1..5: note = siltuximab light chain CDR1
SSVSY

SEQ ID NO: 7303 - skipped

SEQ ID NO: 7304 - protein, 9 aa, synthetic construct
  REGION 1..9: note = siltuximab light chain CDR3
QQWSGYPYT

SEQ ID NO: 7305 - protein, 120 aa, synthetic construct
  REGION 1..120: note = sintilimab heavy chain V region
QVQLVQSGAEVKKPGSSVKVSCKASGGTFSSYAISWVRQAPGQGLEWMGLIIPMFDTAGYAQKFQGRVAITVDESTSTAYMELSSLRSEDTAVYYCARAEHSSTGTFDYWGQGTLVTVSS

SEQ ID NO: 7306 - protein, 8 aa, synthetic construct
  REGION 1..8: note = sintilimab heavy chain CDR1
GGTFSSYA

SEQ ID NO: 7307 - protein, 9 aa, synthetic construct
  REGION 1..9: note = sintilimab heavy chain CDR2
IIPMFDTAG

SEQ ID NO: 7308 - protein, 13 aa, synthetic construct
  REGION 1..13: note = sintilimab heavy chain CDR3
ARAEHSSTGTFDY

SEQ ID NO: 7309 - protein, 107 aa, synthetic construct; identical to SEQ ID NO: 6069
  REGION 1..107: note = sintilimab light chain V region

SEQ ID NO: 7310 - protein, 6 aa, synthetic construct
  REGION 1..6: note = sintilimab light chain CDR1
QGISSW

SEQ ID NO: 7311 - skipped

SEQ ID NO: 7312 - protein, 9 aa, synthetic construct
  REGION 1..9: note = sintilimab light chain CDR3
QQANHLPFT

SEQ ID NO: 7313 - protein, 120 aa, synthetic construct
  REGION 1..120: note = sirtratumab heavy chain V region
QVQLVESGGGVVQPGRSLRLSCAASGFTFSSYGMHWVRQAPGKGLEWVAVIWYDGSNQYYADSVKGRFTISRDNSKNTLFLQMHSLRAEDTAVYYCARGLTSGRYGMDVWGQGTTVTVSS

SEQ ID NO: 7314 - protein, 7 aa, synthetic construct
  REGION 1..7: note = sirtratumab heavy chain CDR1
GFTFSSY

SEQ ID NO: 7315 - protein, 8 aa, synthetic construct
  REGION 1..8: note = sirtratumab heavy chain CDR2
IWYDGSNQ

SEQ ID NO: 7316 - protein, 13 aa, synthetic construct
  REGION 1..13: note = sirtratumab heavy chain CDR3
ARGLTSGRYGMDV

SEQ ID NO: 7317 - protein, 112 aa, synthetic construct
  REGION 1..112: note = sirtratumab light chain V region
DIVMTQSPLSLPVTPGEPASISCRSSQSLLLSHGFNYLDWYLQKPGQSPQLLIYLGSSRASGVPDRFSGSGSGTDFTLKISRVEAEDVGLYYCMQPLQIPWTFGQGTKVEIK

SEQ ID NO: 7318 - protein, 11 aa, synthetic construct
  REGION 1..11: note = sirtratumab light chain CDR1
QSLLLSHGFNY

SEQ ID NO: 7319 - skipped

SEQ ID NO: 7320 - protein, 8 aa, synthetic construct
  REGION 1..8: note = sirtratumab light chain CDR3
QPLQIPWT

SEQ ID NO: 7321 - protein, 120 aa, synthetic construct; identical to SEQ ID NO: 7313
  REGION 1..120: note = sirtratumab vedotin heavy chain V region

SEQ ID NO: 7322 - protein, 7 aa, synthetic construct
  REGION 1..7: note = sirtratumab vedotin heavy chain CDR1
GFTFSSY

SEQ ID NO: 7323 - protein, 8 aa, synthetic construct
  REGION 1..8: note = sirtratumab vedotin heavy chain CDR2
IWYDGSNQ

SEQ ID NO: 7324 - protein, 13 aa, synthetic construct
  REGION 1..13: note = sirtratumab vedotin heavy chain CDR3
ARGLTSGRYGMDV

SEQ ID NO: 7325 - protein, 112 aa, synthetic construct; identical to SEQ ID NO: 7317
  REGION 1..112: note = sirtratumab vedotin light chain V region

SEQ ID NO: 7326 - protein, 10 aa, synthetic construct
  REGION 1..10: note = sirtratumab vedotin light chain CDR1
SLLLSHGFNY

SEQ ID NO: 7327 - skipped

SEQ ID NO: 7328 - protein, 9 aa, synthetic construct
  REGION 1..9: note = sirtratumab vedotin light chain CDR3
MQPLQIPWT

SEQ ID NO: 7329 - protein, 119 aa, synthetic construct
  REGION 1..119: note = sirukumab heavy chain V region
EVQLVESGGGLVQPGGSLRLSCAASGFTFSPFAMSWVRQAPGKGLEWVAKISPGGSWTYYSDTVTGRFTISRDNAKNSLYLQMNSLRAEDTAVYYCARQLWGYYALDIWGQGTTVTVSS

SEQ ID NO: 7330 - protein, 8 aa, synthetic construct
  REGION 1..8: note = sirukumab heavy chain CDR1
GFTFSPFA

SEQ ID NO: 7331 - protein, 8 aa, synthetic construct
  REGION 1..8: note = sirukumab heavy chain CDR2
ISPGGSWT

SEQ ID NO: 7332 - protein, 12 aa, synthetic construct
  REGION 1..12: note = sirukumab heavy chain CDR3
ARQLWGYYALDI

SEQ ID NO: 7333 - protein, 106 aa, synthetic construct
  REGION 1..106: note = sirukumab light chain V region
EIVLTQSPATLSLSPGERATLSCSASISVSYMYWYQQKPGQAPRLLIYDMSNLASGIPARFSGSGSGTDFTLTISSLEPEDFAVYYCMQWSGYPYTFGGGTKVEIK

SEQ ID NO: 7334 - protein, 5 aa, synthetic construct
  REGION 1..5: note = sirukumab light chain CDR1
ISVSY

SEQ ID NO: 7335 - skipped

SEQ ID NO: 7336 - protein, 9 aa, synthetic construct
  REGION 1..9: note = sirukumab light chain CDR3
MQWSGYPYT

SEQ ID NO: 7337 - protein, 119 aa, synthetic construct
  REGION 1..119: note = socazolimab heavy chain V region
EVQLVESGAEVKKPGSSVKVSCKASGGTFSSYAISWVRQAPGQGLEWMGGIIPIFGTANYAQKFQGRVTITADESTSTAYMELSSLRSEDTAVYYCARAPYYYYYMDVWGQGTTVTVSS

SEQ ID NO: 7338 - protein, 7 aa, synthetic construct
  REGION 1..7: note = socazolimab heavy chain CDR1
GGTFSSY

SEQ ID NO: 7339 - protein, 8 aa, synthetic construct
  REGION 1..8: note = socazolimab heavy chain CDR2
IIPIFGTA

SEQ ID NO: 7340 - protein, 12 aa, synthetic construct
  REGION 1..12: note = socazolimab heavy chain CDR3
ARAPYYYYYMDV

SEQ ID NO: 7341 - protein, 109 aa, synthetic construct
  REGION 1..109: note = socazolimab light chain V region
QSALTQPASVSGSLGQSVTISCTGSSSDVGSYNLVSWYQQHPGKAPNLMIYDVSKRSGVSNRFSGSKSGNTASLTISGLQAEDEADYYCSSYTGISTVVFGGGTKLTVL

SEQ ID NO: 7342 - protein, 9 aa, synthetic construct
  REGION 1..9: note = socazolimab light chain CDR1
SSDVGSYNL

SEQ ID NO: 7343 - skipped

SEQ ID NO: 7344 - protein, 10 aa, synthetic construct
  REGION 1..10: note = socazolimab light chain CDR3
SSYTGISTVV

SEQ ID NO: 7345 - protein, 123 aa, synthetic construct
  REGION 1..123: note = sonelokimab heavy chain 1 V region
DVQLVESGGGLVQPGGSLRLSCAASGRTFSSYVVGWFRQAPGKEREFIGAISGSGESIYYAVSEKGRFTISRDNSKNTLYLQMNSLRPEDTAVYYCTADQEFGYLRFGRSEYWGQGTLVTVSS

SEQ ID NO: 7346 - protein, 7 aa, synthetic construct
  REGION 1..7: note = sonelokimab heavy chain 1 CDR1
GRTFSSY

SEQ ID NO: 7347 - protein, 8 aa, synthetic construct
  REGION 1..8: note = sonelokimab heavy chain 1 CDR2
ISGSGESI

SEQ ID NO: 7348 - protein, 16 aa, synthetic construct
  REGION 1..16: note = sonelokimab heavy chain 1 CDR3
TADQEFGYLRFGRSEY

SEQ ID NO: 7349 - protein, 115 aa, synthetic construct [sequence omitted]

SEQ ID NO: 7350 - protein, 7 aa, synthetic construct
  REGION 1..7: note = sonelokimab heavy chain 2 CDR1
GFTFSSF

SEQ ID NO: 7351 - protein, 8 aa, synthetic construct
  REGION 1..8: note = sonelokimab heavy chain 2 CDR2
ISGSGSDT

SEQ ID NO: 7352 - protein, 13 aa, synthetic construct
  REGION 1..13: note = sonelokimab heavy chain 2 CDR3
TIGGSLSRSSQGT

SEQ ID NO: 7353 - protein, 122 aa, synthetic construct
  REGION 1..122: note = sonelokimab heavy chain 3 V region
EVQLVESGGGLVQPGGSLRLSCAASGRTYDAMGWLRQAPGKEREFVAAISGSGDDTYYADSVKGRFTISRDNSKNTLYLQMNSLRPEDTAVYYCATRRGLYYVWDANDYENWGQGTLVTVSS

SEQ ID NO: 7354 - protein, 6 aa, synthetic construct
  REGION 1..6: note = sonelokimab heavy chain 3 CDR1
GRTYDA

SEQ ID NO: 7355 - protein, 8 aa, synthetic construct
  REGION 1..8: note = sonelokimab heavy chain 3 CDR2
ISGSGDDT

SEQ ID NO: 7356 - protein, 16 aa, synthetic construct
  REGION 1..16: note = sonelokimab heavy chain 3 CDR3
ATRRGLYYVWDANDYE

SEQ ID NO: 7357 - protein, 127 aa, synthetic construct; identical to SEQ ID NO: 456
  REGION 1..127: note = sotrovimab heavy chain V region

SEQ ID NO: 7358 - protein, 8 aa, synthetic construct
  REGION 1..8: note = sotrovimab heavy chain CDR1
GYPFTSYG

SEQ ID NO: 7359 - protein, 8 aa, synthetic construct
  REGION 1..8: note = sotrovimab heavy chain CDR2
ISTYQGNT

SEQ ID NO: 7360 - protein, 20 aa, synthetic construct
  REGION 1..20: note = sotrovimab heavy chain CDR3
ARDYTRGAWFGESLIGGFDN

SEQ ID NO: 7361 - protein, 107 aa, synthetic construct [sequence omitted]

SEQ ID NO: 7362 - protein, 7 aa, synthetic construct
  REGION 1..7: note = sotrovimab light chain CDR1
QTVSSTS

SEQ ID NO: 7363 - skipped

SEQ ID NO: 7364 - protein, 8 aa, synthetic construct
  REGION 1..8: note = sotrovimab light chain CDR3
QQHDTSLT

SEQ ID NO: 7365 - protein, 118 aa, synthetic construct [sequence omitted]

SEQ ID NO: 7366 - protein, 8 aa, synthetic construct
  REGION 1..8: note = sudubrilimab heavy chain CDR1
GFTFSETW

SEQ ID NO: 7367 - protein, 8 aa, synthetic construct
  REGION 1..8: note = sudubrilimab heavy chain CDR2
VSPFGGST

SEQ ID NO: 7368 - protein, 11 aa, synthetic construct
  REGION 1..11: note = sudubrilimab heavy chain CDR3
ARRHWPGGFDY

SEQ ID NO: 7369 - protein, 107 aa, synthetic construct [sequence omitted]

SEQ ID NO: 7370 - protein, 6 aa, synthetic construct
  REGION 1..6: note = sudubrilimab light chain CDR1
QDVSTA

SEQ ID NO: 7371 - skipped

SEQ ID NO: 7372 - protein, 9 aa, synthetic construct
  REGION 1..9: note = sudubrilimab light chain CDR3
QQFLYHPAT

SEQ ID NO: 7373 - protein, 121 aa, synthetic construct
  REGION 1..121: note = sugemalimab heavy chain V region
EVQLLESGGGLVQPGGSLRLSCAASGFTFSSYAMSWVRQAPGKGLEWVSGISGSGGFTYYADSVKGRFTISRDNSKNTLYLQMNSLRAEDTAVYYCAKPPRGYNYGPFDYWGQGTLVTVSS

SEQ ID NO: 7374 - protein, 7 aa, synthetic construct
  REGION 1..7: note = sugemalimab heavy chain CDR1
GFTFSSY

SEQ ID NO: 7375 - protein, 8 aa, synthetic construct
  REGION 1..8: note = sugemalimab heavy chain CDR2
ISGSGGFT

SEQ ID NO: 7376 - protein, 14 aa, synthetic construct
  REGION 1..14: note = sugemalimab heavy chain CDR3
AKPPRGYNYGPFDY

SEQ ID NO: 7377 - protein, 108 aa, synthetic construct
  REGION 1..108: note = sugemalimab light chain V region
SYVLTQPPSVSVAPGQTARITCGGNNIGSKSVHWYQQKPGQAPVLVVYDDSDRPSGIPERFSGSNSGNTATLTISRVEAGDEADYYCQVWDSSSDHVVFGGGTKLTVL

SEQ ID NO: 7378 - protein, 6 aa, synthetic construct
  REGION 1..6: note = sugemalimab light chain CDR1
NIGSKS

SEQ ID NO: 7379 - skipped

SEQ ID NO: 7380 - protein, 11 aa, synthetic construct
  REGION 1..11: note = sugemalimab light chain CDR3
QVWDSSSDHVV

SEQ ID NO: 7381 - protein, 123 aa, synthetic construct
  REGION 1..123: note = suptavumab heavy chain V region
EVQLVESGGDLVQPGRSLRLSCVASGFTFDDYAMHWVRQAPGKGLEWVSGVSWSGSTVGYADSVKGRFTVSRDNAQKSLYLQMNSLRAEDTALYYCVKDAYKFNYYYYGLDVWGQGTTVTVSS

SEQ ID NO: 7382 - protein, 8 aa, synthetic construct
  REGION 1..8: note = suptavumab heavy chain CDR1
GFTFDDYA

SEQ ID NO: 7383 - protein, 8 aa, synthetic construct
  REGION 1..8: note = suptavumab heavy chain CDR2
VSWSGSTV

SEQ ID NO: 7384 - protein, 16 aa, synthetic construct
  REGION 1..16: note = suptavumab heavy chain CDR3
VKDAYKFNYYYYGLDV

SEQ ID NO: 7385 - protein, 107 aa, synthetic construct
  REGION 1..107: note = suptavumab light chain V region
EIVMTQSPATLSVSPGERATLSCRASQTILSNLAWYLQKPGQAPRLLIYGASTRATGLPARFSGSGSGTEFTLTISSLQSEDFAVYYCQQYNNWPLTFGGGTKVEIK

SEQ ID NO: 7386 - protein, 6 aa, synthetic construct
  REGION 1..6: note = suptavumab light chain CDR1
QTILSN

SEQ ID NO: 7387 - skipped

SEQ ID NO: 7388 - protein, 9 aa, synthetic construct
  REGION 1..9: note = suptavumab light chain CDR3
QQYNNWPLT

SEQ ID NO: 7389 - protein, 119 aa, synthetic construct
  REGION 1..119: note = surzebiclimab heavy chain V region
EVQLVESGGGLVQPGGSLRLSCAASGFTFSRYAMSWVRQAPGKGLEWVAAISSGGSLYYPDSVKGRFTISRDNAKNTLYLQMNSLRAEDTAVYYCARGREADGGYFDYWGQGTLVTVSS

SEQ ID NO: 7390 - protein, 7 aa, synthetic construct
  REGION 1..7: note = surzebiclimab heavy chain CDR1
GFTFSRY

SEQ ID NO: 7391 - protein, 7 aa, synthetic construct
  REGION 1..7: note = surzebiclimab heavy chain CDR2
ISSGGSL

SEQ ID NO: 7392 - protein, 13 aa, synthetic construct
  REGION 1..13: note = surzebiclimab heavy chain CDR3
ARGREADGGYFDY

SEQ ID NO: 7393 - protein, 111 aa, synthetic construct
  REGION 1..111: note = surzebiclimab light chain V region
EIVLTQSPATLSVSPGERATLSCRASESVEYYGTSLMQWYQQKPGQAPRLLIYAASNVESGIPARFSGSGSGTEFTLTISSLQSEDFAVYYCQQSLKVPLTFGGGTKVEIK

SEQ ID NO: 7394 - protein, 10 aa, synthetic construct
  REGION 1..10: note = surzebiclimab light chain CDR1
ESVEYYGTSL

SEQ ID NO: 7395 - skipped

SEQ ID NO: 7396 - protein, 9 aa, synthetic construct
  REGION 1..9: note = surzebiclimab light chain CDR3
QQSLKVPLT

SEQ ID NO: 7397 - protein, 122 aa, synthetic construct
  REGION 1..122: note = suvratoxumab heavy chain V region
EVQLVESGGGLVQPGGSLRLSCAASGFTFSSHDMHWVRQATGKGLEWVSGIGTAGDTYYPDSVKGRFTISRENAKNSLYLQMNSLRAGDTAVYYCARDRYSPTGHYYGMDVWGQGTTVTVSS

SEQ ID NO: 7398 - protein, 8 aa, synthetic construct
  REGION 1..8: note = suvratoxumab heavy chain CDR1
GFTFSSHD

SEQ ID NO: 7399 - protein, 7 aa, synthetic construct
  REGION 1..7: note = suvratoxumab heavy chain CDR2
IGTAGDT

SEQ ID NO: 7400 - protein, 16 aa, synthetic construct
  REGION 1..16: note = suvratoxumab heavy chain CDR3
ARDRYSPTGHYYGMDV

SEQ ID NO: 7401 - protein, 106 aa, synthetic construct
  REGION 1..106: note = suvratoxumab light chain V region
DIQMTQSPSTLSASVGDRVTITCRASQSISSWLAWYQQKPGKAPKLLIYKASSLESGVPSRFSGSGSGTEFTLTISSLQPDDFATYYCKQYADYWTFGQGTKVEIK

SEQ ID NO: 7402 - protein, 6 aa, synthetic construct
  REGION 1..6: note = suvratoxumab light chain CDR1
QSISSW

SEQ ID NO: 7403 - skipped

SEQ ID NO: 7404 - protein, 8 aa, synthetic construct
  REGION 1..8: note = suvratoxumab light chain CDR3
KQYADYWT

SEQ ID NO: 7405 - protein, 123 aa, synthetic construct [sequence omitted]

SEQ ID NO: 7406 - protein, 8 aa, synthetic construct
  REGION 1..8: note = tabalumab heavy chain CDR1
GGSFSGYY

SEQ ID NO: 7407 - protein, 7 aa, synthetic construct
  REGION 1..7: note = tabalumab heavy chain CDR2
INHSGST

SEQ ID NO: 7408 - protein, 17 aa, synthetic construct
  REGION 1..17: note = tabalumab heavy chain CDR3
ARGYYDILTGYYYYFDY

SEQ ID NO: 7409 - protein, 107 aa, synthetic construct [sequence omitted]

SEQ ID NO: 7410 - protein, 6 aa, synthetic construct
  REGION 1..6: note = tabalumab light chain CDR1
QSVSRY

SEQ ID NO: 7411 - skipped

SEQ ID NO: 7412 - protein, 9 aa, synthetic construct
  REGION 1..9: note = tabalumab light chain CDR3
QQRSNWPRT

SEQ ID NO: 7413 - protein, 118 aa, synthetic construct
  REGION 1..118: note = tabituximab heavy chain V region
EVQLQQSGAELVKPGASVKLSCTASGFNINDTYMHWVKQRPEQGLEWIGRIDPANGNTKYDPKFQGKATITADTSSNTAYLQLSSLTSEDTAVYYCARGARGSRFAYWGQGTLVTVSA

SEQ ID NO: 7414 - protein, 8 aa, synthetic construct
  REGION 1..8: note = tabituximab heavy chain CDR1
GFNINDTY

SEQ ID NO: 7415 - protein, 8 aa, synthetic construct
  REGION 1..8: note = tabituximab heavy chain CDR2
IDPANGNT

SEQ ID NO: 7416 - protein, 11 aa, synthetic construct
  REGION 1..11: note = tabituximab heavy chain CDR3
ARGARGSRFAY

SEQ ID NO: 7417 - protein, 107 aa, synthetic construct
  REGION 1..107: note = tabituximab light chain V region
DIQMTQSPASLSVSVGETVTITCRASENIYSNLAWYQQKQGKSPQLLVYVATNLADGVPSRFSGSGSGTQYSLKINSLQSEDFGSYYCQHFWGTPYTFGGGTKLEIK

SEQ ID NO: 7418 - protein, 6 aa, synthetic construct
  REGION 1..6: note = tabituximab light chain CDR1
ENIYSN

SEQ ID NO: 7419 - skipped

SEQ ID NO: 7420 - protein, 9 aa, synthetic construct
  REGION 1..9: note = tabituximab light chain CDR3
QHFWGTPYT

SEQ ID NO: 7421 - protein, 118 aa, synthetic construct; identical to SEQ ID NO: 7413
  REGION 1..118: note = tabituximab barzuxetan heavy chain V region

SEQ ID NO: 7422 - protein, 8 aa, synthetic construct
  REGION 1..8: note = tabituximab barzuxetan heavy chain CDR1
GFNINDTY

SEQ ID NO: 7423 - protein, 8 aa, synthetic construct
  REGION 1..8: note = tabituximab barzuxetan heavy chain CDR2
IDPANGNT

SEQ ID NO: 7424 - protein, 11 aa, synthetic construct
  REGION 1..11: note = tabituximab barzuxetan heavy chain CDR3
ARGARGSRFAY

SEQ ID NO: 7425 - protein, 107 aa, synthetic construct; identical to SEQ ID NO: 7417
  REGION 1..107: note = tabituximab barzuxetan light chain V region

SEQ ID NO: 7426 - protein, 6 aa, synthetic construct
  REGION 1..6: note = tabituximab barzuxetan light chain CDR1
ENIYSN

SEQ ID NO: 7427 - skipped

SEQ ID NO: 7428 - protein, 9 aa, synthetic construct
  REGION 1..9: note = tabituximab barzuxetan light chain CDR3
QHFWGTPYT

SEQ ID NO: 7429 - protein, 121 aa, synthetic construct
  REGION 1..121: note = tafasitamab heavy chain V region
EVQLVESGGGLVKPGGSLKLSCAASGYTFTSYVMHWVRQAPGKGLEWIGYINPYNDGTKYNEKFQGRVTISSDKSISTAYMELSSLRSEDTAMYYCARGTYYYGTRVFDYWGQGTLVTVSS

SEQ ID NO: 7430 - protein, 8 aa, synthetic construct
  REGION 1..8: note = tafasitamab heavy chain CDR1
GYTFTSYV

SEQ ID NO: 7431 - protein, 8 aa, synthetic construct
  REGION 1..8: note = tafasitamab heavy chain CDR2
INPYNDGT

SEQ ID NO: 7432 - protein, 14 aa, synthetic construct
  REGION 1..14: note = tafasitamab heavy chain CDR3
ARGTYYYGTRVFDY

SEQ ID NO: 7433 - protein, 112 aa, synthetic construct
  REGION 1..112: note = tafasitamab light chain V region
DIVMTQSPATLSLSPGERATLSCRSSKSLQNVNGNTYLYWFQQKPGQSPQLLIYRMSNLNSGVPDRFSGSGSGTEFTLTISSLEPEDFAVYYCMQHLEYPITFGAGTKLEIK

SEQ ID NO: 7434 - protein, 11 aa, synthetic construct
  REGION 1..11: note = tafasitamab light chain CDR1
KSLQNVNGNTY

SEQ ID NO: 7435 - skipped

SEQ ID NO: 7436 - protein, 9 aa, synthetic construct
  REGION 1..9: note = tafasitamab light chain CDR3
MQHLEYPIT

SEQ ID NO: 7437 - protein, 126 aa, synthetic construct
  REGION 1..126: note = tafolecimab heavy chain V region
QLQLQESGPGLVKPSETLSLTCTVSGGSISSASYYWSWIRQPPGKGLEWIGSINYRGSTYYNPSLKSRVTISVDTSKNQFSLKLSSVTAADTAVYYCARENSGVVPAAGPNWFGPWGQGTLVTVSS

SEQ ID NO: 7438 - protein, 10 aa, synthetic construct
  REGION 1..10: note = tafolecimab heavy chain CDR1
GGSISSASYY

SEQ ID NO: 7439 - protein, 7 aa, synthetic construct
  REGION 1..7: note = tafolecimab heavy chain CDR2
INYRGST

SEQ ID NO: 7440 - protein, 18 aa, synthetic construct
  REGION 1..18: note = tafolecimab heavy chain CDR3
ARENSGVVPAAGPNWFGP

SEQ ID NO: 7441 - protein, 106 aa, synthetic construct
  REGION 1..106: note = tafolecimab light chain V region
EIVLTQSPATLSLSPGERATLSCRASQSVSSYLAWYQQKPGQAPRLLIYDASNRATGIPARFSGSGSGTDFTLTISSLEPEDFAVYYCQQRRNWFTFGGGTKVEIK

SEQ ID NO: 7442 - protein, 6 aa, synthetic construct
  REGION 1..6: note = tafolecimab light chain CDR1
QSVSSY

SEQ ID NO: 7443 - skipped

SEQ ID NO: 7444 - protein, 8 aa, synthetic construct
  REGION 1..8: note = tafolecimab light chain CDR3
QQRRNWFT

SEQ ID NO: 7445 - protein, 120 aa, synthetic construct
  REGION 1..120: note = tagitanlimab heavy chain V region
QVQLQESGPGLVKPSETLSITCTVSGFSLSNYDISWIRQPPGKGLEWLGVIWTGGATNYNPALKSRLTISRDNSKNQVSLKMSSVTAADTAVYYCVRDSNYRYDEPFTYWGQGTLVTVSS

SEQ ID NO: 7446 - protein, 8 aa, synthetic construct
  REGION 1..8: note = tagitanlimab heavy chain CDR1
GFSLSNYD

SEQ ID NO: 7447 - protein, 7 aa, synthetic construct
  REGION 1..7: note = tagitanlimab heavy chain CDR2
IWTGGAT

SEQ ID NO: 7448 - protein, 14 aa, synthetic construct
  REGION 1..14: note = tagitanlimab heavy chain CDR3
VRDSNYRYDEPFTY

SEQ ID NO: 7449 - protein, 107 aa, synthetic construct
  REGION 1..107: note = tagitanlimab light chain V region
EIVLTQSPDTLSVTPKEKVTLTCRASQSIGTNIHWFQQKPGQSPKLLIKYASESISGVPSRFSGSGSGTDFTLTINSVEAEDAATYYCQQSNSWPYTFGQGTKLEIK

SEQ ID NO: 7450 - protein, 6 aa, synthetic construct
  REGION 1..6: note = tagitanlimab light chain CDR1
QSIGTN

SEQ ID NO: 7451 - skipped

SEQ ID NO: 7452 - protein, 9 aa, synthetic construct
  REGION 1..9: note = tagitanlimab light chain CDR3
QQSNSWPYT

SEQ ID NO: 7453 - protein, 122 aa, synthetic construct
  REGION 1..122: note = tamgiblimab heavy chain V region
QVQLVQSGAEVKKPGASVKVSCKASGYTFTEYYMHWVRQAPGQGLEWMGIISPSAGSTKYAQKFQGRVTMTRDTSTSTVYMELSSLRSEDTAVYYCARDHDIRLAGRLADYWGQGTLVTVSS

SEQ ID NO: 7454 - protein, 8 aa, synthetic construct
  REGION 1..8: note = tamgiblimab heavy chain CDR1
GYTFTEYY

SEQ ID NO: 7455 - protein, 9 aa, synthetic construct
  REGION 1..9: note = tamgiblimab heavy chain CDR2
ISPSAGSTK

SEQ ID NO: 7456 - protein, 15 aa, synthetic construct
  REGION 1..15: note = tamgiblimab heavy chain CDR3
ARDHDIRLAGRLADY

SEQ ID NO: 7457 - protein, 107 aa, synthetic construct
  REGION 1..107: note = tamgiblimab light chain V region
DIQMTQSPSSVSASVGDRVTITCRASQGISSWLAWYQQKPGKAPKLLISAASSLQSGVPSRFSGSGSGTDFTLTISSLQPEDFATYYCQQAVILPITFGGGTKVEIK

SEQ ID NO: 7458 - protein, 6 aa, synthetic construct
  REGION 1..6: note = tamgiblimab light chain CDR1
QGISSW

SEQ ID NO: 7459 - skipped

SEQ ID NO: 7460 - protein, 9 aa, synthetic construct
  REGION 1..9: note = tamgiblimab light chain CDR3
QQAVILPIT

SEQ ID NO: 7461 - protein, 115 aa, synthetic construct
  REGION 1..115: note = tarextumab heavy chain V region
EVQLVESGGGLVQPGGSLRLSCAASGFTFSSSGMSWVRQAPGKGLEWVSVIASSGSNTYYADSVKGRFTISRDNSKNTLYLQMNSLRAEDTAVYYCARSIFYTTWGQGTLVTVSS

SEQ ID NO: 7462 - protein, 8 aa, synthetic construct
  REGION 1..8: note = tarextumab heavy chain CDR1
GFTFSSSG

SEQ ID NO: 7463 - protein, 8 aa, synthetic construct
  REGION 1..8: note = tarextumab heavy chain CDR2
IASSGSNT

SEQ ID NO: 7464 - protein, 8 aa, synthetic construct
  REGION 1..8: note = tarextumab heavy chain CDR3
ARSIFYTT

SEQ ID NO: 7465 - protein, 108 aa, synthetic construct
  REGION 1..108: note = tarextumab light chain V region
DIVLTQSPATLSLSPGERATLSCRASQSVRSNYLAWYQQKPGQAPRLLIYGASSRATGVPARFSGSGSGTDFTLTISSLEPEDFAVYYCQQYSNFPITFGQGTKVEIK

SEQ ID NO: 7466 - protein, 7 aa, synthetic construct
  REGION 1..7: note = tarextumab light chain CDR1
QSVRSNY

SEQ ID NO: 7467 - skipped

SEQ ID NO: 7468 - protein, 9 aa, synthetic construct
  REGION 1..9: note = tarextumab light chain CDR3
QQYSNFPIT

SEQ ID NO: 7469 - protein, 118 aa, synthetic construct
  REGION 1..118: note = teprotumumab heavy chain V region
QVELVESGGGVVQPGRSQRLSCAASGFTFSSYGMHWVRQAPGKGLEWVAIIWFDGSSTYYADSVRGRFTISRDNSKNTLYLQMNSLRAEDTAVYFCARELGRRYFDLWGRGTLVSVSS

SEQ ID NO: 7470 - protein, 7 aa, synthetic construct
  REGION 1..7: note = teprotumumab heavy chain CDR1
GFTFSSY

SEQ ID NO: 7471 - protein, 8 aa, synthetic construct
  REGION 1..8: note = teprotumumab heavy chain CDR2
IWFDGSST

SEQ ID NO: 7472 - protein, 11 aa, synthetic construct
  REGION 1..11: note = teprotumumab heavy chain CDR3
ARELGRRYFDL

SEQ ID NO: 7473 - protein, 108 aa, synthetic construct
  REGION 1..108: note = teprotumumab light chain V region
EIVLTQSPATLSLSPGERATLSCRASQSVSSYLAWYQQKPGQAPRLLIYDASKRATGIPARFSGSGSGTDFTLTISSLEPEDFAVYYCQQRSKWPPWTFGQGTKVESK

SEQ ID NO: 7474 - protein, 6 aa, synthetic construct
  REGION 1..6: note = teprotumumab light chain CDR1
QSVSSY

SEQ ID NO: 7475 - skipped

SEQ ID NO: 7476 - protein, 10 aa, synthetic construct
  REGION 1..10: note = teprotumumab light chain CDR3
QQRSKWPPWT

SEQ ID NO: 7477 - protein, 116 aa, synthetic construct
  REGION 1..116: note = tesidolumab heavy chain V region
EVQLVQSGAEVKKPGSSVKVSCKASGGTFSSYAISWVRQAPGQGLEWMGGIGPFFGTANYAQKFQGRVTITADESTSTAYMELSSLRSEDTAVYYCARDTPYFDYWGQGTLVTVSS

SEQ ID NO: 7478 - protein, 8 aa, synthetic construct
  REGION 1..8: note = tesidolumab heavy chain CDR1
GGTFSSYA

SEQ ID NO: 7479 - protein, 8 aa, synthetic construct
  REGION 1..8: note = tesidolumab heavy chain CDR2
IGPFFGTA

SEQ ID NO: 7480 - protein, 9 aa, synthetic construct
  REGION 1..9: note = tesidolumab heavy chain CDR3
ARDTPYFDY

SEQ ID NO: 7481 - protein, 108 aa, synthetic construct
  REGION 1..108: note = tesidolumab light chain V region
SYELTQPLSVSVALGQTARITCSGDSIPNYYVYWYQQKPGQAPVLVIYDDSNRPSGIPERFSGSNSGNTATLTISRAQAGDEADYYCQSFDSSLNAEVFGGGTKLTVL

SEQ ID NO: 7482 - protein, 6 aa, synthetic construct
  REGION 1..6: note = tesidolumab light chain CDR1
SIPNYY

SEQ ID NO: 7483 - skipped

SEQ ID NO: 7484 - protein, 11 aa, synthetic construct
  REGION 1..11: note = tesidolumab light chain CDR3
QSFDSSLNAEV

SEQ ID NO: 7485 - protein, 115 aa, synthetic construct
  REGION 1..115: note = tesnatilimab heavy chain V region
QVHLQESGPGLVKPSETLSLTCTVSDDSISSYYWSWIRQPPGKGLEWIGHISYSGSANYNPSLKSRVTISVDTSKNQFSLKLSSVTAADTAVYYCANWDDAFNIWGQGTMVTVSS

SEQ ID NO: 7486 - protein, 8 aa, synthetic construct
  REGION 1..8: note = tesnatilimab heavy chain CDR1
DDSISSYY

SEQ ID NO: 7487 - protein, 7 aa, synthetic construct
  REGION 1..7: note = tesnatilimab heavy chain CDR2
ISYSGSA

SEQ ID NO: 7488 - protein, 9 aa, synthetic construct
  REGION 1..9: note = tesnatilimab heavy chain CDR3
ANWDDAFNI

SEQ ID NO: 7489 - protein, 108 aa, synthetic construct
  REGION 1..108: note = tesnatilimab light chain V region
EIVLTQSPGTLSLSPGERATLSCRASQSVSSSYLAWYQQKPGQAPRLLIYGASSRATGIPDRFSGSGSGTDFTLTISRLEPEDFAVYYCQQYGSSPWTFGQGTKVEIK

SEQ ID NO: 7490 - protein, 7 aa, synthetic construct
  REGION 1..7: note = tesnatilimab light chain CDR1
QSVSSSY

SEQ ID NO: 7491 - skipped

SEQ ID NO: 7492 - protein, 9 aa, synthetic construct
  REGION 1..9: note = tesnatilimab light chain CDR3
QQYGSSPWT

SEQ ID NO: 7493 - protein, 122 aa, synthetic construct
  REGION 1..122: note = tezepelumab heavy chain V region
QMQLVESGGGVVQPGRSLRLSCAASGFTFRTYGMHWVRQAPGKGLEWVAVIWYDGSNKHYADSVKGRFTITRDNSKNTLNLQMNSLRAEDTAVYYCARAPQWELVHEAFDIWGQGTMVTVSS

SEQ ID NO: 7494 - protein, 8 aa, synthetic construct
  REGION 1..8: note = tezepelumab heavy chain CDR1
GFTFRTYG

SEQ ID NO: 7495 - protein, 8 aa, synthetic construct
  REGION 1..8: note = tezepelumab heavy chain CDR2
IWYDGSNK

SEQ ID NO: 7496 - protein, 15 aa, synthetic construct
  REGION 1..15: note = tezepelumab heavy chain CDR3
ARAPQWELVHEAFDI

SEQ ID NO: 7497 - protein, 108 aa, synthetic construct
  REGION 1..108: note = tezepelumab light chain V region
SYVLTQPPSVSVAPGQTARITCGGNNLGSKSVHWYQQKPGQAPVLVVYDDSDRPSWIPERFSGSNSGNTATLTISRGEAGDEADYYCQVWDSSSDHVVFGGGTKLTVL

SEQ ID NO: 7498 - protein, 6 aa, synthetic construct
  REGION 1..6: note = tezepelumab light chain CDR1
NLGSKS

SEQ ID NO: 7499 - skipped

SEQ ID NO: 7500 - protein, 11 aa, synthetic construct
  REGION 1..11: note = tezepelumab light chain CDR3
QVWDSSSDHVV

SEQ ID NO: 7501 - protein, 117 aa, synthetic construct
  REGION 1..117: note = timolumab heavy chain V region
QVQLVESGGGVVQPGRSLRLSCAASGFTFFSYAMHWVRQTPGKGLEWVAVIWFDGSNENYVDSVKGRFTISRDNSKNTLYLQMNTLRAEDTAVYYCARDAWSYFDYWGQGTLVTVSS

SEQ ID NO: 7502 - protein, 7 aa, synthetic construct
  REGION 1..7: note = timolumab heavy chain CDR1
GFTFFSY

SEQ ID NO: 7503 - protein, 8 aa, synthetic construct
  REGION 1..8: note = timolumab heavy chain CDR2
IWFDGSNE

SEQ ID NO: 7504 - protein, 10 aa, synthetic construct
  REGION 1..10: note = timolumab heavy chain CDR3
ARDAWSYFDY

SEQ ID NO: 7505 - protein, 107 aa, synthetic construct
  REGION 1..107: note = timolumab light chain V region
VIQLTQSPSSLSASVGDRVTITCRASQGISRALAWYQQKPGKGPKLLIYDASSLESGVPSRFSGSGSGTDFTLTISSLQPEDFATYYCQQFNSYPLTFGGGTKVEIK

SEQ ID NO: 7506 - protein, 6 aa, synthetic construct
  REGION 1..6: note = timolumab light chain CDR1
QGISRA

SEQ ID NO: 7507 - skipped

SEQ ID NO: 7508 - protein, 9 aa, synthetic construct
  REGION 1..9: note = timolumab light chain CDR3
QQFNSYPLT

SEQ ID NO: 7509 - protein, 126 aa, synthetic construct
  REGION 1..126: note = tiragolumab heavy chain V region
EVQLQQSGPGLVKPSQTLSLTCAISGDSVSSNSAAWNWIRQSPSRGLEWLGKTYYRFKWYSDYAVSVKGRITINPDTSKNQFSLQLNSVTPEDTAVFYCTRESTTYDLLAGPFDYWGQGTLVTVSS

SEQ ID NO: 7510 - protein, 10 aa, synthetic construct
  REGION 1..10: note = tiragolumab heavy chain CDR1
GDSVSSNSAA

SEQ ID NO: 7511 - protein, 9 aa, synthetic construct
  REGION 1..9: note = tiragolumab heavy chain CDR2
TYYRFKWYS

SEQ ID NO: 7512 - protein, 16 aa, synthetic construct
  REGION 1..16: note = tiragolumab heavy chain CDR3
TRESTTYDLLAGPFDY

SEQ ID NO: 7513 - protein, 113 aa, synthetic construct
  REGION 1..113: note = tiragolumab light chain V region
DIVMTQSPDSLAVSLGERATINCKSSQTVLYSSNNKKYLAWYQQKPGQPPNLLIYWASTRESGVPDRFSGSGSGTDFTLTISSLQAEDVAVYYCQQYYSTPFTFGPGTKVEIK

SEQ ID NO: 7514 - protein, 12 aa, synthetic construct
  REGION 1..12: note = tiragolumab light chain CDR1
QTVLYSSNNKKY

SEQ ID NO: 7515 - skipped

SEQ ID NO: 7516 - protein, 9 aa, synthetic construct
  REGION 1..9: note = tiragolumab light chain CDR3
QQYYSTPFT

SEQ ID NO: 7517 - protein, 118 aa, synthetic construct
  REGION 1..118: note = tisotumab heavy chain V region
EVQLLESGGGLVQPGGSLRLSCAASGFTFSNYAMSWVRQAPGKGLEWVSSISGSGDYTYYTDSVKGRFTISRDNSKNTLYLQMNSLRAEDTAVYYCARSPWGYYLDSWGQGTLVTVSS

SEQ ID NO: 7518 - protein, 7 aa, synthetic construct
  REGION 1..7: note = tisotumab heavy chain CDR1
GFTFSNY

SEQ ID NO: 7519 - protein, 8 aa, synthetic construct
  REGION 1..8: note = tisotumab heavy chain CDR2
ISGSGDYT

SEQ ID NO: 7520 - protein, 11 aa, synthetic construct
  REGION 1..11: note = tisotumab heavy chain CDR3
ARSPWGYYLDS

SEQ ID NO: 7521 - protein, 107 aa, synthetic construct
  REGION 1..107: note = tisotumab light chain V region
DIQMTQSPPSLSASAGDRVTITCRASQGISSRLAWYQQKPEKAPKSLIYAASSLQSGVPSRFSGSGSGTDFTLTISSLQPEDFATYYCQQYNSYPYTFGQGTKLEIK

SEQ ID NO: 7522 - protein, 6 aa, synthetic construct
  REGION 1..6: note = tisotumab light chain CDR1
QGISSR

SEQ ID NO: 7523 - skipped

SEQ ID NO: 7524 - protein, 9 aa, synthetic construct
  REGION 1..9: note = tisotumab light chain CDR3
QQYNSYPYT

SEQ ID NO: 7525 - protein, 118 aa, synthetic construct; identical to SEQ ID NO: 7517
  REGION 1..118: note = tisotumab vedotin heavy chain V region

SEQ ID NO: 7526 - protein, 8 aa, synthetic construct
  REGION 1..8: note = tisotumab vedotin heavy chain CDR1
GFTFSNYA

SEQ ID NO: 7527 - protein, 8 aa, synthetic construct
  REGION 1..8: note = tisotumab vedotin heavy chain CDR2
ISGSGDYT

SEQ ID NO: 7528 - protein, 11 aa, synthetic construct
  REGION 1..11: note = tisotumab vedotin heavy chain CDR3
ARSPWGYYLDS

SEQ ID NO: 7529 - protein, 107 aa, synthetic construct; identical to SEQ ID NO: 7521
  REGION 1..107: note = tisotumab vedotin light chain V region

SEQ ID NO: 7530 - protein, 6 aa, synthetic construct
  REGION 1..6: note = tisotumab vedotin light chain CDR1
QGISSR

SEQ ID NO: 7531 - skipped

SEQ ID NO: 7532 - protein, 9 aa, synthetic construct
  REGION 1..9: note = tisotumab vedotin light chain CDR3
QQYNSYPYT

SEQ ID NO: 7533 - protein, 123 aa, synthetic construct; identical to SEQ ID NO: 452
  REGION 1..123: note = tixavimab heavy chain V region

SEQ ID NO: 7534 - protein, 8 aa, synthetic construct
  REGION 1..8: note = tixavimab heavy chain CDR1
GFTFMSSA

SEQ ID NO: 7535 - protein, 8 aa, synthetic construct
  REGION 1..8: note = tixavimab heavy chain CDR2
IVIGSGNT

SEQ ID NO: 7536 - protein, 16 aa, synthetic construct
  REGION 1..16: note = tixavimab heavy chain CDR3
AAPYCSSISCNDGFDI

SEQ ID NO: 7537 - protein, 109 aa, synthetic construct; identical to SEQ ID NO: 451
  REGION 1..109: note = tixavimab light chain V region

SEQ ID NO: 7538 - protein, 7 aa, synthetic construct
  REGION 1..7: note = tixavimab light chain CDR1
QSVSSSY

SEQ ID NO: 7539 - skipped

SEQ ID NO: 7540 - protein, 10 aa, synthetic construct
  REGION 1..10: note = tixavimab light chain CDR3
QHYGSSRGWT

SEQ ID NO: 7541 - protein, 119 aa, synthetic construct [sequence omitted]

SEQ ID NO: 7542 - protein, 9 aa, synthetic construct
  REGION 1..9: note = tocilizumab heavy chain CDR1
GYSITSDHA

SEQ ID NO: 7543 - protein, 7 aa, synthetic construct
  REGION 1..7: note = tocilizumab heavy chain CDR2
ISYSGIT

SEQ ID NO: 7544 - protein, 12 aa, synthetic construct
  REGION 1..12: note = tocilizumab heavy chain CDR3
ARSLARTTAMDY

SEQ ID NO: 7545 - protein, 107 aa, synthetic construct [sequence omitted]

SEQ ID NO: 7546 - protein, 6 aa, synthetic construct
  REGION 1..6: note = tocilizumab light chain CDR1
QDISSY

SEQ ID NO: 7547 - skipped

SEQ ID NO: 7548 - protein, 9 aa, synthetic construct
  REGION 1..9: note = tocilizumab light chain CDR3
QQGNTLPYT

SEQ ID NO: 7549 - protein, 121 aa, synthetic construct
  REGION 1..121: note = tosatoxumab heavy chain V region
EVQMVQSGAEVKKPGEPLKISCKGSGYKFGTHWIGWVRQRPGKGLEWMGIIHPADSETKYSPSFQGQVSFSADKSSNTAYLHWSTLRASDTAMYYCARRSGSSSWYALDFWGQGTMVTVSS

SEQ ID NO: 7550 - protein, 8 aa, synthetic construct
  REGION 1..8: note = tosatoxumab heavy chain CDR1
GYKFGTHW

SEQ ID NO: 7551 - protein, 8 aa, synthetic construct
  REGION 1..8: note = tosatoxumab heavy chain CDR2
IHPADSET

SEQ ID NO: 7552 - protein, 14 aa, synthetic construct
  REGION 1..14: note = tosatoxumab heavy chain CDR3
ARRSGSSSWYALDF

SEQ ID NO: 7553 - protein, 111 aa, synthetic construct
  REGION 1..111: note = tosatoxumab light chain V region
QSVLTQSPSASGTPGQRVTISCSGGSSNIGSNTVNWYQQFPGAAPKLLIYTNNQRPSGVPDRFSGSKSGTSASLAISGLQSEDEADYYCATWDDSLNGLYVFGTGTKVTVL

SEQ ID NO: 7554 - protein, 8 aa, synthetic construct
  REGION 1..8: note = tosatoxumab light chain CDR1
SSNIGSNT

SEQ ID NO: 7555 - skipped

SEQ ID NO: 7556 - protein, 12 aa, synthetic construct
  REGION 1..12: note = tosatoxumab light chain CDR3
ATWDDSLNGLYV

SEQ ID NO: 7557 - protein, 120 aa, synthetic construct
  REGION 1..120: note = tovetumab heavy chain V region
QVQLVESGGGLVKPGGSLRLSCAASGFTFSDYYMNWIRQAPGKGLEWVSYISSSGSIIYYADSVKGRFTISRDNAKNSLYLQMNSLRAEDTAVYYCAREGRIAARGMDVWGQGTTVTVSS

SEQ ID NO: 7558 - protein, 7 aa, synthetic construct
  REGION 1..7: note = tovetumab heavy chain CDR1
GFTFSDY

SEQ ID NO: 7559 - protein, 8 aa, synthetic construct
  REGION 1..8: note = tovetumab heavy chain CDR2
ISSSGSII

SEQ ID NO: 7560 - protein, 13 aa, synthetic construct
  REGION 1..13: note = tovetumab heavy chain CDR3
AREGRIAARGMDV

SEQ ID NO: 7561 - protein, 108 aa, synthetic construct
  REGION 1..108: note = tovetumab light chain V region
DIQMTQSPSSLSASVGDRVSITCRPSQSFSRYINWYQQKPGKAPKLLIHAASSLVGGVPSRFSGSGSGTDFTLTISSLQPEDFATYYCQQTYSNPPITFGQGTRLEMK

SEQ ID NO: 7562 - protein, 6 aa, synthetic construct
  REGION 1..6: note = tovetumab light chain CDR1
QSFSRY

SEQ ID NO: 7563 - skipped

SEQ ID NO: 7564 - protein, 10 aa, synthetic construct
  REGION 1..10: note = tovetumab light chain CDR3
QQTYSNPPIT

SEQ ID NO: 7565 - protein, 126 aa, synthetic construct
  REGION 1..126: note = tozorakimab heavy chain V region
EVQLLESGGGLVQPGGSLRLSCAASGFTFSSYAMSWVRQAPGKGLEWVSGISAIDQSTYYADSVKGRFTISRDNSKNTLYLQMNSLRAEDTAVYYCARQKFMQLWGGGLRYPFGYWGQGTMVTVSS

SEQ ID NO: 7566 - protein, 8 aa, synthetic construct
  REGION 1..8: note = tozorakimab heavy chain CDR1
GFTFSSYA

SEQ ID NO: 7567 - protein, 8 aa, synthetic construct
  REGION 1..8: note = tozorakimab heavy chain CDR2
ISAIDQST

SEQ ID NO: 7568 - protein, 19 aa, synthetic construct
  REGION 1..19: note = tozorakimab heavy chain CDR3
ARQKFMQLWGGGLRYPFGY

SEQ ID NO: 7569 - protein, 106 aa, synthetic construct
  REGION 1..106: note = tozorakimab light chain V region
SYVLTQPPSVSVSPGQTASITCSGEGMGDKYAAWYQQKPGQSPVLVIYRDTKRPSGIPERFSGSNSGNTATLTISGTQAMDEADYYCGVIQDNTGVFGGGTKLTVL

SEQ ID NO: 7570 - protein, 6 aa, synthetic construct
  REGION 1..6: note = tozorakimab light chain CDR1
GMGDKY

SEQ ID NO: 7571 - skipped

SEQ ID NO: 7572 - protein, 9 aa, synthetic construct
  REGION 1..9: note = tozorakimab light chain CDR3
GVIQDNTGV

SEQ ID NO: 7573 - protein, 122 aa, synthetic construct
  REGION 1..122: note = tralokinumab heavy chain V region
QVQLVQSGAEVKKPGASVKVSCKASGYTFTNYGLSWVRQAPGQGLEWMGWISANNGDTNYGQEFQGRVTMTTDTSTSTAYMELRSLRSDDTAVYYCARDSSSSWARWFFDLWGRGTLVTVSS

SEQ ID NO: 7574 - protein, 8 aa, synthetic construct
  REGION 1..8: note = tralokinumab heavy chain CDR1
GYTFTNYG

SEQ ID NO: 7575 - protein, 8 aa, synthetic construct
  REGION 1..8: note = tralokinumab heavy chain CDR2
ISANNGDT

SEQ ID NO: 7576 - protein, 15 aa, synthetic construct
  REGION 1..15: note = tralokinumab heavy chain CDR3
ARDSSSSWARWFFDL

SEQ ID NO: 7577 - protein, 108 aa, synthetic construct
  REGION 1..108: note = tralokinumab light chain V region
SYVLTQPPSVSVAPGKTARITCGGNIIGSKLVHWYQQKPGQAPVLVIYDDGDRPSGIPERFSGSNSGNTATLTISRVEAGDEADYYCQVWDTGSDPVVFGGGTKLTVL

SEQ ID NO: 7578 - protein, 6 aa, synthetic construct
  REGION 1..6: note = tralokinumab light chain CDR1
IIGSKL

SEQ ID NO: 7579 - skipped

SEQ ID NO: 7580 - protein, 11 aa, synthetic construct
  REGION 1..11: note = tralokinumab light chain CDR3
QVWDTGSDPVV

SEQ ID NO: 7581 - protein, 120 aa, synthetic construct [sequence omitted]

SEQ ID NO: 7582 - protein, 8 aa, synthetic construct
  REGION 1..8: note = trastuzumab heavy chain CDR1
GFNIKDTY

SEQ ID NO: 7583 - protein, 8 aa, synthetic construct
  REGION 1..8: note = trastuzumab heavy chain CDR2
IYPTNGYT

SEQ ID NO: 7584 - protein, 13 aa, synthetic construct
  REGION 1..13: note = trastuzumab heavy chain CDR3
SRWGGDGFYAMDY

SEQ ID NO: 7585 - protein, 107 aa, synthetic construct [sequence omitted]

SEQ ID NO: 7586 - protein, 6 aa, synthetic construct
  REGION 1..6: note = trastuzumab light chain CDR1
QDVNTA

SEQ ID NO: 7587 - skipped

SEQ ID NO: 7588 - protein, 9 aa, synthetic construct
  REGION 1..9: note = trastuzumab light chain CDR3
QQHYTTPPT

SEQ ID NO: 7589 - protein, 125 aa, synthetic construct
  REGION 1..125: note = tremelimumab heavy chain V region
QVQLVESGGGVVQPGRSLRLSCAASGFTFSSYGMHWVRQAPGKGLEWVAVIWYDGSNKYYADSVKGRFTISRDNSKNTLYLQMNSLRAEDTAVYYCARDPRGATLYYYYYGMDVWGQGTTVTVSS

SEQ ID NO: 7590 - protein, 8 aa, synthetic construct
  REGION 1..8: note = tremelimumab heavy chain CDR1
GFTFSSYG

SEQ ID NO: 7591 - protein, 8 aa, synthetic construct
  REGION 1..8: note = tremelimumab heavy chain CDR2
IWYDGSNK

SEQ ID NO: 7592 - protein, 18 aa, synthetic construct
  REGION 1..18: note = tremelimumab heavy chain CDR3
ARDPRGATLYYYYYGMDV

SEQ ID NO: 7593 - protein, 107 aa, synthetic construct
  REGION 1..107: note = tremelimumab light chain V region
DIQMTQSPSSLSASVGDRVTITCRASQSINSYLDWYQQKPGKAPKLLIYAASSLQSGVPSRFSGSGSGTDFTLTISSLQPEDFATYYCQQYYSTPFTFGPGTKVEIK

SEQ ID NO: 7594 - protein, 6 aa, synthetic construct
  REGION 1..6: note = tremelimumab light chain CDR1
QSINSY

SEQ ID NO: 7595 - skipped

SEQ ID NO: 7596 - protein, 9 aa, synthetic construct
  REGION 1..9: note = tremelimumab light chain CDR3
QQYYSTPFT

SEQ ID NO: 7597 - protein, 120 aa, synthetic construct
  REGION 1..120: note = trevogrumab heavy chain V region
EVQVLESGGDLVQPGGSLRLSCAASGFTFSAYAMTWVRQAPGKGLEWVSAISGSGGSAYYADSVKGRFTISRDNSKNTVYLQMNSLRAEDTAVYYCAKDGAWKMSGLDVWGQGTTVIVSS

SEQ ID NO: 7598 - protein, 8 aa, synthetic construct
  REGION 1..8: note = trevogrumab heavy chain CDR1
GFTFSAYA

SEQ ID NO: 7599 - protein, 8 aa, synthetic construct
  REGION 1..8: note = trevogrumab heavy chain CDR2
ISGSGGSA

SEQ ID NO: 7600 - protein, 13 aa, synthetic construct
  REGION 1..13: note = trevogrumab heavy chain CDR3
AKDGAWKMSGLDV

SEQ ID NO: 7601 - protein, 107 aa, synthetic construct
  REGION 1..107: note = trevogrumab light chain V region
DIQMTQSPASLSASVGDRVTITCRASQDISDYLAWYQQKPGKIPRLLIYTTSTLQSGVPSRFRGSGSGTDFTLTISSLQPEDVATYYCQKYDSAPLTFGGGTKVEIK

SEQ ID NO: 7602 - protein, 6 aa, synthetic construct
  REGION 1..6: note = trevogrumab light chain CDR1
QDISDY

SEQ ID NO: 7603 - skipped

SEQ ID NO: 7604 - protein, 9 aa, synthetic construct
  REGION 1..9: note = trevogrumab light chain CDR3
QKYDSAPLT

SEQ ID NO: 7605 - protein, 118 aa, synthetic construct
  REGION 1..118: note = tuvonralimab heavy chain V region
QVQLVESGGGVVEPGRSLRLSCAASGFTFSSYGMHWVRQAPGKGLEWVAVIWYKPSEKDYADSAKGRFTISRDNSKNTLYLQMNSLRAEDTAVYYCARGGLLGYFDYWGQGTLVTVSS

SEQ ID NO: 7606 - protein, 7 aa, synthetic construct
  REGION 1..7: note = tuvonralimab heavy chain CDR1
GFTFSSY

SEQ ID NO: 7607 - protein, 8 aa, synthetic construct
  REGION 1..8: note = tuvonralimab heavy chain CDR2
IWYKPSEK

SEQ ID NO: 7608 - protein, 11 aa, synthetic construct
  REGION 1..11: note = tuvonralimab heavy chain CDR3
ARGGLLGYFDY

SEQ ID NO: 7609 - protein, 107 aa, synthetic construct
  REGION 1..107: note = tuvonralimab light chain V region
EIVLTQSPGTLSLSPGERATLSCRASQSINSYLAWYQQKPGQAPRPLIYGVSSRATGIPDRFSGSGSGTDFTLTISRLEPEDFAVYYCQQYGRYPFTFGPGTKVDIK

SEQ ID NO: 7610 - protein, 6 aa, synthetic construct
  REGION 1..6: note = tuvonralimab light chain CDR1
QSINSY

SEQ ID NO: 7611 - skipped

SEQ ID NO: 7612 - protein, 9 aa, synthetic construct
  REGION 1..9: note = tuvonralimab light chain CDR3
QQYGRYPFT

SEQ ID NO: 7613 - protein, 118 aa, synthetic construct
  REGION 1..118: note = ublituximab heavy chain V region
QAYLQQSGAELVRPGASVKMSCKASGYTFTSYNMHWVKQTPRQGLEWIGGIYPGNGDTSYNQKFKGKATLTVGKSSSTAYMQLSSLTSEDSAVYFCARYDYNYAMDYWGQGTSVTVSS

SEQ ID NO: 7614 - protein, 8 aa, synthetic construct
  REGION 1..8: note = ublituximab heavy chain CDR1
GYTFTSYN

SEQ ID NO: 7615 - protein, 8 aa, synthetic construct
  REGION 1..8: note = ublituximab heavy chain CDR2
IYPGNGDT

SEQ ID NO: 7616 - protein, 11 aa, synthetic construct
  REGION 1..11: note = ublituximab heavy chain CDR3
ARYDYNYAMDY

SEQ ID NO: 7617 - protein, 106 aa, synthetic construct
  REGION 1..106: note = ublituximab light chain V region
QIVLSQSPAILSASPGEKVTMTCRASSSVSYMHWYQQKPGSSPKPWIYATSNLASGVPARFSGSGSGTSYSFTISRVEAEDAATYYCQQWTFNPPTFGGGTRLEIK

SEQ ID NO: 7618 - protein, 5 aa, synthetic construct
  REGION 1..5: note = ublituximab light chain CDR1
SSVSY

SEQ ID NO: 7619 - skipped

SEQ ID NO: 7620 - protein, 9 aa, synthetic construct
  REGION 1..9: note = ublituximab light chain CDR3
QQWTFNPPT

SEQ ID NO: 7621 - protein, 125 aa, synthetic construct
  REGION 1..125: note = ulocuplumab heavy chain V region
EVQLVESGGGLVQPGGSLRLSCAAAGFTFSSYSMNWVRQAPGKGLEWVSYISSRSRTIYYADSVKGRFTISRDNAKNSLYLQMNSLRDEDTAVYYCARDYGGQPPYYYYYGMDVWGQGTTVTVSS

SEQ ID NO: 7622 - protein, 8 aa, synthetic construct
  REGION 1..8: note = ulocuplumab heavy chain CDR1
GFTFSSYS

SEQ ID NO: 7623 - protein, 8 aa, synthetic construct
  REGION 1..8: note = ulocuplumab heavy chain CDR2
ISSRSRTI

SEQ ID NO: 7624 - protein, 18 aa, synthetic construct
  REGION 1..18: note = ulocuplumab heavy chain CDR3
ARDYGGQPPYYYYYGMDV

SEQ ID NO: 7625 - protein, 107 aa, synthetic construct
  REGION 1..107: note = ulocuplumab light chain V region
DIQMTQSPSSLSASVGDRVTITCRASQGISSWLAWYQQKPEKAPKSLIYAASSLQSGVPSRFSGSGSGTDFTLTISSLQPEDFVTYYCQQYNSYPRTFGQGTKVEIK

SEQ ID NO: 7626 - protein, 6 aa, synthetic construct
  REGION 1..6: note = ulocuplumab light chain CDR1
QGISSW

SEQ ID NO: 7627 - skipped

SEQ ID NO: 7628 - protein, 9 aa, synthetic construct
  REGION 1..9: note = ulocuplumab light chain CDR3
QQYNSYPRT

SEQ ID NO: 7629 - protein, 125 aa, synthetic construct
  REGION 1..125: note = urabrelimab heavy chain V region
QVQLQESGPGLVKPSGTLSLTCAVSGVSIRSINWWNWVRQPPGKGLEWIGEIYHSGSTNYNPSLKSRVTISVDKSKNQFSLKLNSVTAADTAVYYCARDGGIAVTDYYYYGLDVWGQGTTVTVSS

SEQ ID NO: 7630 - protein, 9 aa, synthetic construct
  REGION 1..9: note = urabrelimab heavy chain CDR1
GVSIRSINW

SEQ ID NO: 7631 - protein, 7 aa, synthetic construct
  REGION 1..7: note = urabrelimab heavy chain CDR2
IYHSGST

SEQ ID NO: 7632 - protein, 18 aa, synthetic construct
  REGION 1..18: note = urabrelimab heavy chain CDR3
ARDGGIAVTDYYYYGLDV

SEQ ID NO: 7633 - protein, 106 aa, synthetic construct
  REGION 1..106: note = urabrelimab light chain V region
EIVLTQSPATLSLSPGERATLSCRASESVSSNLAWYQQKPGQAPRLLIYGAFNRATGIPARFSGSGSGTDFTLTISSLEPEDFAVYYCQQRSDWFTFGGGTKVEIK

SEQ ID NO: 7634 - protein, 6 aa, synthetic construct
  REGION 1..6: note = urabrelimab light chain CDR1
ESVSSN

SEQ ID NO: 7635 - skipped

SEQ ID NO: 7636 - protein, 8 aa, synthetic construct
  REGION 1..8: note = urabrelimab light chain CDR3
QQRSDWFT

SEQ ID NO: 7637 - protein, 121 aa, synthetic construct [sequence omitted]

SEQ ID NO: 7638 - protein, 8 aa, synthetic construct
  REGION 1..8: note = urelumab heavy chain CDR1
GGSFSGYY

SEQ ID NO: 7639 - protein, 7 aa, synthetic construct
  REGION 1..7: note = urelumab heavy chain CDR2
INHGGYV

SEQ ID NO: 7640 - protein, 15 aa, synthetic construct
  REGION 1..15: note = urelumab heavy chain CDR3
ARDYGPGNYDWYFDL

SEQ ID NO: 7641 - protein, 109 aa, synthetic construct
  REGION 1..109: note = urelumab light chain V region
EIVLTQSPATLSLSPGERATLSCRASQSVSSYLAWYQQKPGQAPRLLIYDASNRATGIPARFSGSGSGTDFTLTISSLEPEDFAVYYCQQRSNWPPALTFCGGTKVEIK

SEQ ID NO: 7642 - protein, 6 aa, synthetic construct
  REGION 1..6: note = urelumab light chain CDR1
QSVSSY

SEQ ID NO: 7643 - skipped

SEQ ID NO: 7644 - protein, 13 aa, synthetic construct
  REGION 1..13: note = urelumab light chain CDR3
QQRSNWPPALTFC

SEQ ID NO: 7645 - protein, 119 aa, synthetic construct
  REGION 1..119: note = ustekinumab heavy chain V region
EVQLVQSGAEVKKPGESLKISCKGSGYSFTTYWLGWVRQMPGKGLDWIGIMSPVDSDIRYSPSFQGQVTMSVDKSITTAYLQWNSLKASDTAMYYCARRRPGQGYFDFWGQGTLVTVSS

SEQ ID NO: 7646 - protein, 8 aa, synthetic construct
  REGION 1..8: note = ustekinumab heavy chain CDR1
GYSFTTYW

SEQ ID NO: 7647 - protein, 8 aa, synthetic construct
  REGION 1..8: note = ustekinumab heavy chain CDR2
MSPVDSDI

SEQ ID NO: 7648 - protein, 12 aa, synthetic construct
  REGION 1..12: note = ustekinumab heavy chain CDR3
ARRRPGQGYFDF

SEQ ID NO: 7649 - protein, 107 aa, synthetic construct
  REGION 1..107: note = ustekinumab light chain V region
DIQMTQSPSSLSASVGDRVTITCRASQGISSWLAWYQQKPEKAPKSLIYAASSLQSGVPSRFSGSGSGTDFTLTISSLQPEDFATYYCQQYNIYPYTFGQGTKLEIK

SEQ ID NO: 7650 - protein, 6 aa, synthetic construct
  REGION 1..6: note = ustekinumab light chain CDR1
QGISSW

SEQ ID NO: 7651 - skipped

SEQ ID NO: 7652 - protein, 9 aa, synthetic construct
  REGION 1..9: note = ustekinumab light chain CDR3
QQYNIYPYT

SEQ ID NO: 7653 - protein, 116 aa, synthetic construct
  REGION 1..116: note = utomilumab heavy chain V region
EVQLVQSGAEVKKPGESLRISCKGSGYSFSTYWISWVRQMPGKGLEWMGKIYPGDSYTNYSPSFQGQVTISADKSISTAYLQWSSLKASDTAMYYCARGYGIFDYWGQGTLVTVSS

SEQ ID NO: 7654 - protein, 8 aa, synthetic construct
  REGION 1..8: note = utomilumab heavy chain CDR1
GYSFSTYW

SEQ ID NO: 7655 - protein, 8 aa, synthetic construct
  REGION 1..8: note = utomilumab heavy chain CDR2
IYPGDSYT

SEQ ID NO: 7656 - protein, 9 aa, synthetic construct
  REGION 1..9: note = utomilumab heavy chain CDR3
ARGYGIFDY

SEQ ID NO: 7657 - protein, 108 aa, synthetic construct
  REGION 1..108: note = utomilumab light chain V region
SYELTQPPSVSVSPGQTASITCSGDNIGDQYAHWYQQKPGQSPVLVIYQDKNRPSGIPERFSGSNSGNTATLTISGTQAMDEADYYCATYTGFGSLAVFGGGTKLTVL

SEQ ID NO: 7658 - protein, 6 aa, synthetic construct
  REGION 1..6: note = utomilumab light chain CDR1
NIGDQY

SEQ ID NO: 7659 - skipped

SEQ ID NO: 7660 - protein, 11 aa, synthetic construct
  REGION 1..11: note = utomilumab light chain CDR3
ATYTGFGSLAV

SEQ ID NO: 7661 - protein, 118 aa, synthetic construct
  REGION 1..118: note = vantictumab heavy chain V region
EVQLVESGGGLVQPGGSLRLSCAASGFTFSHYTLSWVRQAPGKGLEWVSVISGDGSYTYYADSVKGRFTISSDNSKNTLYLQMNSLRAEDTAVYYCARNFIKYVFANWGQGTLVTVSS

SEQ ID NO: 7662 - protein, 8 aa, synthetic construct
  REGION 1..8: note = vantictumab heavy chain CDR1
GFTFSHYT

SEQ ID NO: 7663 - protein, 8 aa, synthetic construct
  REGION 1..8: note = vantictumab heavy chain CDR2
ISGDGSYT

SEQ ID NO: 7664 - protein, 11 aa, synthetic construct
  REGION 1..11: note = vantictumab heavy chain CDR3
ARNFIKYVFAN

SEQ ID NO: 7665 - protein, 107 aa, synthetic construct
  REGION 1..107: note = vantictumab light chain V region
DIELTQPPSVSVAPGQTARISCSGDNIGSFYVHWYQQKPGQAPVLVIYDKSNRPSGIPERFSGSNSGNTATLTISGTQAEDEADYYCQSYANTLSLVFGGGTKLTVL

SEQ ID NO: 7666 - protein, 6 aa, synthetic construct
  REGION 1..6: note = vantictumab light chain CDR1
NIGSFY

SEQ ID NO: 7667 - skipped

SEQ ID NO: 7668 - protein, 10 aa, synthetic construct
  REGION 1..10: note = vantictumab light chain CDR3
QSYANTLSLV

SEQ ID NO: 7669 - protein, 126 aa, synthetic construct
  REGION 1..126: note = varisacumab heavy chain V region
QVQLVQSGAEVKKPGASVKVSCKASGGTFSSYAISWVRQAPGQGLEWMGGFDPEDGETIYAQKFQGRVTMTEDTSTDTAYMELSSLRSEDTAVYYCATGRSMVRGVIIPFNGMDVWGQGTTVTVSS

SEQ ID NO: 7670 - protein, 8 aa, synthetic construct
  REGION 1..8: note = varisacumab heavy chain CDR1
GGTFSSYA

SEQ ID NO: 7671 - protein, 8 aa, synthetic construct
  REGION 1..8: note = varisacumab heavy chain CDR2
FDPEDGET

SEQ ID NO: 7672 - protein, 19 aa, synthetic construct
  REGION 1..19: note = varisacumab heavy chain CDR3
ATGRSMVRGVIIPFNGMDV

SEQ ID NO: 7673 - protein, 107 aa, synthetic construct
  REGION 1..107: note = varisacumab light chain V region
DIRMTQSPSSLSASVGDRVTITCRASQSISSYLNWYQQKPGKAPKLLIYAASSLQSGVPSRFSGSGSGTDFTLTISSLQPEDFATYYCQQSYSTPLTFGGGTKVEIK

SEQ ID NO: 7674 - protein, 6 aa, synthetic construct
  REGION 1..6: note = varisacumab light chain CDR1
QSISSY

SEQ ID NO: 7675 - skipped

SEQ ID NO: 7676 - protein, 9 aa, synthetic construct
  REGION 1..9: note = varisacumab light chain CDR3
QQSYSTPLT

SEQ ID NO: 7677 - protein, 119 aa, synthetic construct
  REGION 1..119: note = varlilumab heavy chain V region
QVQLVESGGGVVQPGRSLRLSCAASGFTFSSYDMHWVRQAPGKGLEWVAVIWYDGSNKYYADSVKGRFTISRDNSKNTLYLQMNSLRAEDTAVYYCARGSGNWGFFDYWGQGTLVTVSS

SEQ ID NO: 7678 - protein, 8 aa, synthetic construct
  REGION 1..8: note = varlilumab heavy chain CDR1
GFTFSSYD

SEQ ID NO: 7679 - protein, 8 aa, synthetic construct
  REGION 1..8: note = varlilumab heavy chain CDR2
IWYDGSNK

SEQ ID NO: 7680 - protein, 12 aa, synthetic construct
  REGION 1..12: note = varlilumab heavy chain CDR3
ARGSGNWGFFDY

SEQ ID NO: 7681 - protein, 107 aa, synthetic construct
  REGION 1..107: note = varlilumab light chain V region
DIQMTQSPSSLSASVGDRVTITCRASQGISRWLAWYQQKPEKAPKSLIYAASSLQSGVPSRFSGSGSGTDFTLTISSLQPEDFATYYCQQYNTYPRTFGQGTKVEIK

SEQ ID NO: 7682 - protein, 6 aa, synthetic construct
  REGION 1..6: note = varlilumab light chain CDR1
QGISRW

SEQ ID NO: 7683 - skipped

SEQ ID NO: 7684 - protein, 9 aa, synthetic construct
  REGION 1..9: note = varlilumab light chain CDR3
QQYNTYPRT

SEQ ID NO: 7685 - protein, 121 aa, synthetic construct [sequence omitted]

SEQ ID NO: 7686 - protein, 8 aa, synthetic construct
  REGION 1..8: note = vedolizumab heavy chain CDR1
GYTFTSYW

SEQ ID NO: 7687 - protein, 8 aa, synthetic construct
  REGION 1..8: note = vedolizumab heavy chain CDR2
IDPSESNT

SEQ ID NO: 7688 - protein, 14 aa, synthetic construct
  REGION 1..14: note = vedolizumab heavy chain CDR3
ARGGYDGWDYAIDY

SEQ ID NO: 7689 - protein, 112 aa, synthetic construct [sequence omitted]

SEQ ID NO: 7690 - protein, 11 aa, synthetic construct
  REGION 1..11: note = vedolizumab light chain CDR1
QSLAKSYGNTY

SEQ ID NO: 7691 - skipped

SEQ ID NO: 7692 - protein, 9 aa, synthetic construct
  REGION 1..9: note = vedolizumab light chain CDR3
LQGTHQPYT

SEQ ID NO: 7693 - protein, 123 aa, synthetic construct [sequence omitted]

SEQ ID NO: 7694 - protein, 8 aa, synthetic construct
  REGION 1..8: note = vesencumab heavy chain CDR1
GFTFSSYA

SEQ ID NO: 7695 - protein, 8 aa, synthetic construct
  REGION 1..8: note = vesencumab heavy chain CDR2
ISPAGGYT

SEQ ID NO: 7696 - protein, 16 aa, synthetic construct
  REGION 1..16: note = vesencumab heavy chain CDR3
ARGELPYYRMSKVMDV

SEQ ID NO: 7697 - protein, 107 aa, synthetic construct
  REGION 1..107: note = vesencumab light chain V region
DIQMTQSPSSLSASVGDRVTITCRASQYFSSYLAWYQQKPGKAPKLLIYGASSRASGVPSRFSGSGSGTDFTLTISSLQPEDFATYYCQQYLGSPPTFGQGTKVEIK

SEQ ID NO: 7698 - protein, 6 aa, synthetic construct
  REGION 1..6: note = vesencumab light chain CDR1
QYFSSY

SEQ ID NO: 7699 - skipped

SEQ ID NO: 7700 - protein, 9 aa, synthetic construct
  REGION 1..9: note = vesencumab light chain CDR3
QQYLGSPPT

SEQ ID NO: 7701 - protein, 126 aa, synthetic construct
  REGION 1..126: note = vixarelimab heavy chain V region
QVQLVQSGAEVKKPGASVKVSCKASGYTFTSYEINWVRQATGQGLEWMGWMNPNSGYTGYAQKFQGRVTMTRDTSISTAYMEMSSLRSEDTAVYYCARDIVAANTDYYFYYGMDVWGQGTTVTVSS

SEQ ID NO: 7702 - protein, 8 aa, synthetic construct
  REGION 1..8: note = vixarelimab heavy chain CDR1
GYTFTSYE

SEQ ID NO: 7703 - protein, 8 aa, synthetic construct
  REGION 1..8: note = vixarelimab heavy chain CDR2
MNPNSGYT

SEQ ID NO: 7704 - protein, 19 aa, synthetic construct
  REGION 1..19: note = vixarelimab heavy chain CDR3
ARDIVAANTDYYFYYGMDV

SEQ ID NO: 7705 - protein, 110 aa, synthetic construct
  REGION 1..110: note = vixarelimab light chain V region
QSVLTQPPSASGTPGQRVTISCSGSNSNIGSNTVNWYHQLPGTAPKLLIYNINKRPSGVPDRFSGSKSGSSASLAISGLQSEDEADYYCSTWDDSLDGVVFGGGTKLTVL

SEQ ID NO: 7706 - protein, 8 aa, synthetic construct
  REGION 1..8: note = vixarelimab light chain CDR1
NSNIGSNT

SEQ ID NO: 7707 - skipped

SEQ ID NO: 7708 - protein, 11 aa, synthetic construct
  REGION 1..11: note = vixarelimab light chain CDR3
STWDDSLDGVV

SEQ ID NO: 7709 - protein, 128 aa, synthetic construct
  REGION 1..128: note = volagidemab heavy chain V region
QVQLVESGGGVVQPGRSLRLSCAASGFTFSSYGMHWVRQAPGKGLEWVAVMWYDGSNKDYVDSVKGRFTISRDNSKNTLYLQMNRLRAEDTAVYYCAREKDHYDILTGYNYYYGLDVWGQGTTVTVSS

SEQ ID NO: 7710 - protein, 8 aa, synthetic construct
  REGION 1..8: note = volagidemab heavy chain CDR1
GFTFSSYG

SEQ ID NO: 7711 - protein, 8 aa, synthetic construct
  REGION 1..8: note = volagidemab heavy chain CDR2
MWYDGSNK

SEQ ID NO: 7712 - protein, 21 aa, synthetic construct
  REGION 1..21: note = volagidemab heavy chain CDR3
AREKDHYDILTGYNYYYGLDV

SEQ ID NO: 7713 - protein, 107 aa, synthetic construct
  REGION 1..107: note = volagidemab light chain V region
DIQMTQSPSSLSASVGDRVTITCRASQGIRNDLGWYQQKPGKAPKRLIYAASSLQSGVPSRFSGSGSGTEFTLTISSVQPEDFVTYYCLQHNSNPLTFGGGTKVEIK

SEQ ID NO: 7714 - protein, 6 aa, synthetic construct
  REGION 1..6: note = volagidemab light chain CDR1
QGIRND

SEQ ID NO: 7715 - skipped

SEQ ID NO: 7716 - protein, 9 aa, synthetic construct
  REGION 1..9: note = volagidemab light chain CDR3
LQHNSNPLT

SEQ ID NO: 7717 - protein, 117 aa, synthetic construct
  REGION 1..117: note = vulinacimab heavy chain V region
QVQLVQSGGGLVQPGGSLRLSCAASGFSFSTYAMSWVRQAPGKGLEWVSGISGSGGTTHYADSVKGRFTISRDNSKNTVNLQMNSLRAEDTAVYYCAKGLWFGEGLWGQGTLVTVSS

SEQ ID NO: 7718 - protein, 8 aa, synthetic construct
  REGION 1..8: note = vulinacimab heavy chain CDR1
GFSFSTYA

SEQ ID NO: 7719 - protein, 8 aa, synthetic construct
  REGION 1..8: note = vulinacimab heavy chain CDR2
ISGSGGTT

SEQ ID NO: 7720 - protein, 10 aa, synthetic construct
  REGION 1..10: note = vulinacimab heavy chain CDR3
AKGLWFGEGL

SEQ ID NO: 7721 - protein, 112 aa, synthetic construct
  REGION 1..112: note = vulinacimab light chain V region
DVVMTQSPLSLPVTLGQPASISCRSSQSLYYRSGYTFLDWYVQKPGQSPQLLIYQSSKRDSGVPDRISGSGSGTDFTLRISRVEAEDVGVYYCFQGTHWPYTFGQGTKLEIK

SEQ ID NO: 7722 - protein, 11 aa, synthetic construct
  REGION 1..11: note = vulinacimab light chain CDR1
QSLYYRSGYTF

SEQ ID NO: 7723 - skipped

SEQ ID NO: 7724 - protein, 9 aa, synthetic construct
  REGION 1..9: note = vulinacimab light chain CDR3
FQGTHWPYT

SEQ ID NO: 7725 - protein, 117 aa, synthetic construct
  REGION 1..117: note = xentuzumab heavy chain V region
QVELVESGGGLVQPGGSLRLSCAASGFTFTSYWMSWVRQAPGKGLELVSSITSYGSFTYYADSVKGRFTISRDNSKNTLYLQMNSLRAEDTAVYYCARNMYTHFDSWGQGTLVTVSS

SEQ ID NO: 7726 - protein, 8 aa, synthetic construct
  REGION 1..8: note = xentuzumab heavy chain CDR1
GFTFTSYW

SEQ ID NO: 7727 - protein, 8 aa, synthetic construct
  REGION 1..8: note = xentuzumab heavy chain CDR2
ITSYGSFT

SEQ ID NO: 7728 - protein, 10 aa, synthetic construct
  REGION 1..10: note = xentuzumab heavy chain CDR3
ARNMYTHFDS

SEQ ID NO: 7729 - protein, 110 aa, synthetic construct
  REGION 1..110: note = xentuzumab light chain V region
DIVLTQPPSVSGAPGQRVTISCSGSSSNIGSNSVSWYQQLPGTAPKLLIYDNSKRPSGVPDRFSGSKSGTSASLAITGLQSEDEADYYCQSRDTYGYYWVFGGGTKLTVL

SEQ ID NO: 7730 - protein, 8 aa, synthetic construct
  REGION 1..8: note = xentuzumab light chain CDR1
SSNIGSNS

SEQ ID NO: 7731 - skipped

SEQ ID NO: 7732 - protein, 11 aa, synthetic construct
  REGION 1..11: note = xentuzumab light chain CDR3
QSRDTYGYYWV

SEQ ID NO: 7733 - protein, 118 aa, synthetic construct
  REGION 1..118: note = zalifrelimab heavy chain V region
EVQLVESGGGLVKPGGSLRLSCAASGFTFSSYSMNWVRQAPGKGLEWVSSISSSSSYIYYADSVKGRFTISRDNAKNSLYLQMNSLRAEDTAVYYCARVGLMGPFDIWGQGTMVTVSS

SEQ ID NO: 7734 - protein, 8 aa, synthetic construct
  REGION 1..8: note = zalifrelimab heavy chain CDR1
GFTFSSYS

SEQ ID NO: 7735 - protein, 8 aa, synthetic construct
  REGION 1..8: note = zalifrelimab heavy chain CDR2
ISSSSSYI

SEQ ID NO: 7736 - protein, 11 aa, synthetic construct
  REGION 1..11: note = zalifrelimab heavy chain CDR3
ARVGLMGPFDI

SEQ ID NO: 7737 - protein, 107 aa, synthetic construct; identical to SEQ ID NO: 5533
  REGION 1..107: note = zalifrelimab light chain V region

SEQ ID NO: 7738 - protein, 6 aa, synthetic construct
  REGION 1..6: note = zalifrelimab light chain CDR1
QSVSRY

SEQ ID NO: 7739 - skipped

SEQ ID NO: 7740 - protein, 9 aa, synthetic construct
  REGION 1..9: note = zalifrelimab light chain CDR3
QQYGSSPWT

SEQ ID NO: 7741 - protein, 120 aa, synthetic construct
  REGION 1..120: note = zeluvalimab heavy chain V region
EVQLLESGGGLVQPGGSLRLSCAASGFTFSSYDMSWVRQAPGKGLEWVSLISGGGSQTYYAESVKGRFTISRDNSKNTLYLQMNSLRAEDTAVYFCASPSGHYFYAMDVWGQGTTVTVSS

SEQ ID NO: 7742 - protein, 8 aa, synthetic construct
  REGION 1..8: note = zeluvalimab heavy chain CDR1
GFTFSSYD

SEQ ID NO: 7743 - protein, 8 aa, synthetic construct
  REGION 1..8: note = zeluvalimab heavy chain CDR2
ISGGGSQT

SEQ ID NO: 7744 - protein, 13 aa, synthetic construct
  REGION 1..13: note = zeluvalimab heavy chain CDR3
ASPSGHYFYAMDV

SEQ ID NO: 7745 - protein, 107 aa, synthetic construct
  REGION 1..107: note = zeluvalimab light chain V region
DIQMTQSPSSVSASVGDRVTITCRASQGISNWLAWYQQKPGKAPKLLIFAASSLQSGVPSRFSGSGSGTDFTLTISSLQPEDFATYYCQQAESFPHTFGGGTKVEIK

SEQ ID NO: 7746 - protein, 6 aa, synthetic construct
  REGION 1..6: note = zeluvalimab light chain CDR1
QGISNW

SEQ ID NO: 7747 - skipped

SEQ ID NO: 7748 - protein, 9 aa, synthetic construct
  REGION 1..9: note = zeluvalimab light chain CDR3
QQAESFPHT

SEQ ID NO: 7749 - protein, 120 aa, synthetic construct
  REGION 1..120: note = ziltivekimab heavy chain V region
EVQLVESGGGLVQPGGSLRLSCAASGFTISSNYMIWVRQAPGKGLEWVSDLYYYAGDTYYADSVKGRFTMSRDISKNTVYLQMNSLRAEDTAVYYCARWADDHPPWIDLWGRGTLVTVSS

SEQ ID NO: 7750 - protein, 8 aa, synthetic construct
  REGION 1..8: note = ziltivekimab heavy chain CDR1
GFTISSNY

SEQ ID NO: 7751 - protein, 8 aa, synthetic construct
  REGION 1..8: note = ziltivekimab heavy chain CDR2
LYYYAGDT

SEQ ID NO: 7752 - protein, 13 aa, synthetic construct
  REGION 1..13: note = ziltivekimab heavy chain CDR3
ARWADDHPPWIDL

SEQ ID NO: 7753 - protein, 106 aa, synthetic construct
  REGION 1..106: note = ziltivekimab light chain V region
DIQMTQSPSTLSASVGDRVTITCRASQGISSWLAWYQQKPGKAPKVLIYKASTLESGVPSRFSGSGSGTEFTLTISSLQPDDFATYYCQQSWLGGSFGQGTKLEIK

SEQ ID NO: 7754 - protein, 6 aa, synthetic construct
  REGION 1..6: note = ziltivekimab light chain CDR1
QGISSW

SEQ ID NO: 7755 - skipped

SEQ ID NO: 7756 - protein, 8 aa, synthetic construct
  REGION 1..8: note = ziltivekimab light chain CDR3
QQSWLGGS

SEQ ID NO: 7757 - protein, 123 aa, synthetic construct
  REGION 1..123: note = zimberelimab heavy chain V region
QLQLQESGPGLVKPSETLTLTCTVSADSISSTTYYWVWIRQPPGKGLEWIGSISYSGSTYYNPSLKSRVTVSVDTSKNQFSLKLNSVAATDTALYYCARHLGYNGRYLPFDYWGQGTLVTVSS

SEQ ID NO: 7758 - protein, 10 aa, synthetic construct
  REGION 1..10: note = zimberelimab heavy chain CDR1
ADSISSTTYY

SEQ ID NO: 7759 - protein, 7 aa, synthetic construct
  REGION 1..7: note = zimberelimab heavy chain CDR2
ISYSGST

SEQ ID NO: 7760 - protein, 15 aa, synthetic construct
  REGION 1..15: note = zimberelimab heavy chain CDR3
ARHLGYNGRYLPFDY

SEQ ID NO: 7761 - protein, 110 aa, synthetic construct
  REGION 1..110: note = zimberelimab light chain V region
QSALTQPASVSGSPGQSITISCTGTSSDVGFYNYVSWYQQHPGKAPELMIYDVSNRPSGVSDRFSGSKSGNTASLTISGLQAEDEADYYCSSYTSISTWVFGGGTKLTVL

SEQ ID NO: 7762 - protein, 9 aa, synthetic construct
  REGION 1..9: note = zimberelimab light chain CDR1
SSDVGFYNY

SEQ ID NO: 7763 - skipped

SEQ ID NO: 7764 - protein, 10 aa, synthetic construct
  REGION 1..10: note = zimberelimab light chain CDR3
SSYTSISTWV

SEQ ID NO: 7765 - protein, 605 aa, synthetic construct; identical to SEQ ID NO: 714
  REGION 1..605: note = FMC63_VH-CH1/N84S/Q39K/S183E/CLD201-YYRR/hole/RF

SEQ ID NO: 7766 - protein, 605 aa, synthetic construct
  REGION 1..605: note = FMC63_VH-CH1/N84S/Q39K/S183E/CLD201-KYRR/hole/RF
EVKLQESGPGLVAPSQSLSVTCTVSGVSLPDYGVSWIRKPPRKGLEWLGVIWGSETTYYNSALKSRLTIIKDNSKSQVFLKMSSLQTDDTAIYYCAKHYYYGGSYAMDYWGQGTSVTVSSASTKGPSVFPLAPSSKSTSGGTAALGCLVKDYFPEPVTVSWNSGALTSGVHTFPAVLQSSGLYSLESVVTVPSSSLGTQTYICNVNHKPSNTKVDKKVEPKSCTDWSPYADQSIKVRISLKSALGDKAKEWNDNEMYLFRSSVAYAMRQYFLKVKNQMILFGEEDVRVANLKPRISFNFFVTAPKNVSDIIPRTEVEKAIRMSRSRINDAFRLNDNSLEFLGIQPTLGPPNQPPVSTSTSPTRSMAPGAVHLPQPVSTRDKTHTCPPCPAPELLGGPSVFLFPPKPKDTLMISRTPEVTCVVVDVSHEDPEVKFNWYVDGVEVHNAKTKPREEQYNSTYRVVSVLTVLHQDWLNGKEYKCKVSNKALPAPIEKTISKAKGQPREPQVCTLPPSRDELTKNQVSLSCAVKGFYPSDIAVEWESNGQPENNYKTTPPVLDSDGSFFLVSKLTVDKSRWQQGNVFSCSVMHEALHNRFTQKSLSLSPG

SEQ ID NO: 7767 - protein, 605 aa, synthetic construct
  REGION 1..605: note = FMC63_VH-CH1/N84S/Q39K/S183E/CLD201-EYRR/hole/RF
EVKLQESGPGLVAPSQSLSVTCTVSGVSLPDYGVSWIRKPPRKGLEWLGVIWGSETTYYNSALKSRLTIIKDNSKSQVFLKMSSLQTDDTAIYYCAKHYYYGGSYAMDYWGQGTSVTVSSASTKGPSVFPLAPSSKSTSGGTAALGCLVKDYFPEPVTVSWNSGALTSGVHTFPAVLQSSGLYSLESVVTVPSSSLGTQTYICNVNHKPSNTKVDKKVEPKSCTDWSPYADQSIKVRISLKSALGDKAEEWNDNEMYLFRSSVAYAMRQYFLKVKNQMILFGEEDVRVANLKPRISFNFFVTAPKNVSDIIPRTEVEKAIRMSRSRINDAFRLNDNSLEFLGIQPTLGPPNQPPVSTSTSPTRSMAPGAVHLPQPVSTRDKTHTCPPCPAPELLGGPSVFLFPPKPKDTLMISRTPEVTCVVVDVSHEDPEVKFNWYVDGVEVHNAKTKPREEQYNSTYRVVSVLTVLHQDWLNGKEYKCKVSNKALPAPIEKTISKAKGQPREPQVCTLPPSRDELTKNQVSLSCAVKGFYPSDIAVEWESNGQPENNYKTTPPVLDSDGSFFLVSKLTVDKSRWQQGNVFSCSVMHEALHNRFTQKSLSLSPG

SEQ ID NO: 7768 - protein, 605 aa, synthetic construct
  REGION 1..605: note = FMC63_VH-CH1/N84S/Q39K/S183E/CLD201-YYRK/hole/RF
EVKLQESGPGLVAPSQSLSVTCTVSGVSLPDYGVSWIRKPPRKGLEWLGVIWGSETTYYNSALKSRLTIIKDNSKSQVFLKMSSLQTDDTAIYYCAKHYYYGGSYAMDYWGQGTSVTVSSASTKGPSVFPLAPSSKSTSGGTAALGCLVKDYFPEPVTVSWNSGALTSGVHTFPAVLQSSGLYSLESVVTVPSSSLGTQTYICNVNHKPSNTKVDKKVEPKSCTDWSPYADQSIKVRISLKSALGDKAYEWNDNEMYLFRSSVAYAMRQYFLKVKNQMILFGEEDVRVANLKPRISFNFFVTAPKNVSDIIPRTEVEKAIRMSRSKINDAFRLNDNSLEFLGIQPTLGPPNQPPVSTSTSPTRSMAPGAVHLPQPVSTRDKTHTCPPCPAPELLGGPSVFLFPPKPKDTLMISRTPEVTCVVVDVSHEDPEVKFNWYVDGVEVHNAKTKPREEQYNSTYRVVSVLTVLHQDWLNGKEYKCKVSNKALPAPIEKTISKAKGQPREPQVCTLPPSRDELTKNQVSLSCAVKGFYPSDIAVEWESNGQPENNYKTTPPVLDSDGSFFLVSKLTVDKSRWQQGNVFSCSVMHEALHNRFTQKSLSLSPG

SEQ ID NO: 7769 - protein, 605 aa, synthetic construct
  REGION 1..605: note = FMC63_VH-CH1/N84S/Q39K/S183E/CLD201-KYRK/hole/RF
EVKLQESGPGLVAPSQSLSVTCTVSGVSLPDYGVSWIRKPPRKGLEWLGVIWGSETTYYNSALKSRLTIIKDNSKSQVFLKMSSLQTDDTAIYYCAKHYYYGGSYAMDYWGQGTSVTVSSASTKGPSVFPLAPSSKSTSGGTAALGCLVKDYFPEPVTVSWNSGALTSGVHTFPAVLQSSGLYSLESVVTVPSSSLGTQTYICNVNHKPSNTKVDKKVEPKSCTDWSPYADQSIKVRISLKSALGDKAKEWNDNEMYLFRSSVAYAMRQYFLKVKNQMILFGEEDVRVANLKPRISFNFFVTAPKNVSDIIPRTEVEKAIRMSRSKINDAFRLNDNSLEFLGIQPTLGPPNQPPVSTSTSPTRSMAPGAVHLPQPVSTRDKTHTCPPCPAPELLGGPSVFLFPPKPKDTLMISRTPEVTCVVVDVSHEDPEVKFNWYVDGVEVHNAKTKPREEQYNSTYRVVSVLTVLHQDWLNGKEYKCKVSNKALPAPIEKTISKAKGQPREPQVCTLPPSRDELTKNQVSLSCAVKGFYPSDIAVEWESNGQPENNYKTTPPVLDSDGSFFLVSKLTVDKSRWQQGNVFSCSVMHEALHNRFTQKSLSLSPG

SEQ ID NO: 7770 - protein, 605 aa, synthetic construct
  REGION 1..605: note = FMC63_VH-CH1/N84S/Q39K/S183E/CLD201-EYRK/hole/RF
EVKLQESGPGLVAPSQSLSVTCTVSGVSLPDYGVSWIRKPPRKGLEWLGVIWGSETTYYNSALKSRLTIIKDNSKSQVFLKMSSLQTDDTAIYYCAKHYYYGGSYAMDYWGQGTSVTVSSASTKGPSVFPLAPSSKSTSGGTAALGCLVKDYFPEPVTVSWNSGALTSGVHTFPAVLQSSGLYSLESVVTVPSSSLGTQTYICNVNHKPSNTKVDKKVEPKSCTDWSPYADQSIKVRISLKSALGDKAEEWNDNEMYLFRSSVAYAMRQYFLKVKNQMILFGEEDVRVANLKPRISFNFFVTAPKNVSDIIPRTEVEKAIRMSRSKINDAFRLNDNSLEFLGIQPTLGPPNQPPVSTSTSPTRSMAPGAVHLPQPVSTRDKTHTCPPCPAPELLGGPSVFLFPPKPKDTLMISRTPEVTCVVVDVSHEDPEVKFNWYVDGVEVHNAKTKPREEQYNSTYRVVSVLTVLHQDWLNGKEYKCKVSNKALPAPIEKTISKAKGQPREPQVCTLPPSRDELTKNQVSLSCAVKGFYPSDIAVEWESNGQPENNYKTTPPVLDSDGSFFLVSKLTVDKSRWQQGNVFSCSVMHEALHNRFTQKSLSLSPG

SEQ ID NO: 7771 - protein, 605 aa, synthetic construct
  REGION 1..605: note = FMC63_VH-CH1/N84S/Q39K/S183E/CLD201-YYRE/hole/RF
EVKLQESGPGLVAPSQSLSVTCTVSGVSLPDYGVSWIRKPPRKGLEWLGVIWGSETTYYNSALKSRLTIIKDNSKSQVFLKMSSLQTDDTAIYYCAKHYYYGGSYAMDYWGQGTSVTVSSASTKGPSVFPLAPSSKSTSGGTAALGCLVKDYFPEPVTVSWNSGALTSGVHTFPAVLQSSGLYSLESVVTVPSSSLGTQTYICNVNHKPSNTKVDKKVEPKSCTDWSPYADQSIKVRISLKSALGDKAYEWNDNEMYLFRSSVAYAMRQYFLKVKNQMILFGEEDVRVANLKPRISFNFFVTAPKNVSDIIPRTEVEKAIRMSRSEINDAFRLNDNSLEFLGIQPTLGPPNQPPVSTSTSPTRSMAPGAVHLPQPVSTRDKTHTCPPCPAPELLGGPSVFLFPPKPKDTLMISRTPEVTCVVVDVSHEDPEVKFNWYVDGVEVHNAKTKPREEQYNSTYRVVSVLTVLHQDWLNGKEYKCKVSNKALPAPIEKTISKAKGQPREPQVCTLPPSRDELTKNQVSLSCAVKGFYPSDIAVEWESNGQPENNYKTTPPVLDSDGSFFLVSKLTVDKSRWQQGNVFSCSVMHEALHNRFTQKSLSLSPG

SEQ ID NO: 7772 - protein, 605 aa, synthetic construct
  REGION 1..605: note = FMC63_VH-CH1/N84S/Q39K/S183E/CLD201-KYRE/hole/RF
EVKLQESGPGLVAPSQSLSVTCTVSGVSLPDYGVSWIRKPPRKGLEWLGVIWGSETTYYNSALKSRLTIIKDNSKSQVFLKMSSLQTDDTAIYYCAKHYYYGGSYAMDYWGQGTSVTVSSASTKGPSVFPLAPSSKSTSGGTAALGCLVKDYFPEPVTVSWNSGALTSGVHTFPAVLQSSGLYSLESVVTVPSSSLGTQTYICNVNHKPSNTKVDKKVEPKSCTDWSPYADQSIKVRISLKSALGDKAKEWNDNEMYLFRSSVAYAMRQYFLKVKNQMILFGEEDVRVANLKPRISFNFFVTAPKNVSDIIPRTEVEKAIRMSRSEINDAFRLNDNSLEFLGIQPTLGPPNQPPVSTSTSPTRSMAPGAVHLPQPVSTRDKTHTCPPCPAPELLGGPSVFLFPPKPKDTLMISRTPEVTCVVVDVSHEDPEVKFNWYVDGVEVHNAKTKPREEQYNSTYRVVSVLTVLHQDWLNGKEYKCKVSNKALPAPIEKTISKAKGQPREPQVCTLPPSRDELTKNQVSLSCAVKGFYPSDIAVEWESNGQPENNYKTTPPVLDSDGSFFLVSKLTVDKSRWQQGNVFSCSVMHEALHNRFTQKSLSLSPG

SEQ ID NO: 7773 - protein, 605 aa, synthetic construct
  REGION 1..605: note = FMC63_VH-CH1/N84S/Q39K/S183E/CLD201-EYRE/hole/RF
EVKLQESGPGLVAPSQSLSVTCTVSGVSLPDYGVSWIRKPPRKGLEWLGVIWGSETTYYNSALKSRLTIIKDNSKSQVFLKMSSLQTDDTAIYYCAKHYYYGGSYAMDYWGQGTSVTVSSASTKGPSVFPLAPSSKSTSGGTAALGCLVKDYFPEPVTVSWNSGALTSGVHTFPAVLQSSGLYSLESVVTVPSSSLGTQTYICNVNHKPSNTKVDKKVEPKSCTDWSPYADQSIKVRISLKSALGDKAEEWNDNEMYLFRSSVAYAMRQYFLKVKNQMILFGEEDVRVANLKPRISFNFFVTAPKNVSDIIPRTEVEKAIRMSRSEINDAFRLNDNSLEFLGIQPTLGPPNQPPVSTSTSPTRSMAPGAVHLPQPVSTRDKTHTCPPCPAPELLGGPSVFLFPPKPKDTLMISRTPEVTCVVVDVSHEDPEVKFNWYVDGVEVHNAKTKPREEQYNSTYRVVSVLTVLHQDWLNGKEYKCKVSNKALPAPIEKTISKAKGQPREPQVCTLPPSRDELTKNQVSLSCAVKGFYPSDIAVEWESNGQPENNYKTTPPVLDSDGSFFLVSKLTVDKSRWQQGNVFSCSVMHEALHNRFTQKSLSLSPG

SEQ ID NO: 7774 - protein, 605 aa, synthetic construct
  REGION 1..605: note = FMC63_VH-CH1/N84S/Q39K/S183E/CLD201-YKRR/hole/RF
EVKLQESGPGLVAPSQSLSVTCTVSGVSLPDYGVSWIRKPPRKGLEWLGVIWGSETTYYNSALKSRLTIIKDNSKSQVFLKMSSLQTDDTAIYYCAKHYYYGGSYAMDYWGQGTSVTVSSASTKGPSVFPLAPSSKSTSGGTAALGCLVKDYFPEPVTVSWNSGALTSGVHTFPAVLQSSGLYSLESVVTVPSSSLGTQTYICNVNHKPSNTKVDKKVEPKSCTDWSPYADQSIKVRISLKSALGDKAYEWNDNEMKLFRSSVAYAMRQYFLKVKNQMILFGEEDVRVANLKPRISFNFFVTAPKNVSDIIPRTEVEKAIRMSRSRINDAFRLNDNSLEFLGIQPTLGPPNQPPVSTSTSPTRSMAPGAVHLPQPVSTRDKTHTCPPCPAPELLGGPSVFLFPPKPKDTLMISRTPEVTCVVVDVSHEDPEVKFNWYVDGVEVHNAKTKPREEQYNSTYRVVSVLTVLHQDWLNGKEYKCKVSNKALPAPIEKTISKAKGQPREPQVCTLPPSRDELTKNQVSLSCAVKGFYPSDIAVEWESNGQPENNYKTTPPVLDSDGSFFLVSKLTVDKSRWQQGNVFSCSVMHEALHNRFTQKSLSLSPG

SEQ ID NO: 7775 - protein, 605 aa, synthetic construct
  REGION 1..605: note = FMC63_VH-CH1/N84S/Q39K/S183E/CLD201-KKRR/hole/RF
EVKLQESGPGLVAPSQSLSVTCTVSGVSLPDYGVSWIRKPPRKGLEWLGVIWGSETTYYNSALKSRLTIIKDNSKSQVFLKMSSLQTDDTAIYYCAKHYYYGGSYAMDYWGQGTSVTVSSASTKGPSVFPLAPSSKSTSGGTAALGCLVKDYFPEPVTVSWNSGALTSGVHTFPAVLQSSGLYSLESVVTVPSSSLGTQTYICNVNHKPSNTKVDKKVEPKSCTDWSPYADQSIKVRISLKSALGDKAKEWNDNEMKLFRSSVAYAMRQYFLKVKNQMILFGEEDVRVANLKPRISFNFFVTAPKNVSDIIPRTEVEKAIRMSRSRINDAFRLNDNSLEFLGIQPTLGPPNQPPVSTSTSPTRSMAPGAVHLPQPVSTRDKTHTCPPCPAPELLGGPSVFLFPPKPKDTLMISRTPEVTCVVVDVSHEDPEVKFNWYVDGVEVHNAKTKPREEQYNSTYRVVSVLTVLHQDWLNGKEYKCKVSNKALPAPIEKTISKAKGQPREPQVCTLPPSRDELTKNQVSLSCAVKGFYPSDIAVEWESNGQPENNYKTTPPVLDSDGSFFLVSKLTVDKSRWQQGNVFSCSVMHEALHNRFTQKSLSLSPG

SEQ ID NO: 7776 - protein, 605 aa, synthetic construct
  REGION 1..605: note = FMC63_VH-CH1/N84S/Q39K/S183E/CLD201-EKRR/hole/RF
EVKLQESGPGLVAPSQSLSVTCTVSGVSLPDYGVSWIRKPPRKGLEWLGVIWGSETTYYNSALKSRLTIIKDNSKSQVFLKMSSLQTDDTAIYYCAKHYYYGGSYAMDYWGQGTSVTVSSASTKGPSVFPLAPSSKSTSGGTAALGCLVKDYFPEPVTVSWNSGALTSGVHTFPAVLQSSGLYSLESVVTVPSSSLGTQTYICNVNHKPSNTKVDKKVEPKSCTDWSPYADQSIKVRISLKSALGDKAEEWNDNEMKLFRSSVAYAMRQYFLKVKNQMILFGEEDVRVANLKPRISFNFFVTAPKNVSDIIPRTEVEKAIRMSRSRINDAFRLNDNSLEFLGIQPTLGPPNQPPVSTSTSPTRSMAPGAVHLPQPVSTRDKTHTCPPCPAPELLGGPSVFLFPPKPKDTLMISRTPEVTCVVVDVSHEDPEVKFNWYVDGVEVHNAKTKPREEQYNSTYRVVSVLTVLHQDWLNGKEYKCKVSNKALPAPIEKTISKAKGQPREPQVCTLPPSRDELTKNQVSLSCAVKGFYPSDIAVEWESNGQPENNYKTTPPVLDSDGSFFLVSKLTVDKSRWQQGNVFSCSVMHEALHNRFTQKSLSLSPG

SEQ ID NO: 7777 - protein, 605 aa, synthetic construct
  REGION 1..605: note = FMC63_VH-CH1/N84S/Q39K/S183E/CLD201-YKRK/hole/RF
EVKLQESGPGLVAPSQSLSVTCTVSGVSLPDYGVSWIRKPPRKGLEWLGVIWGSETTYYNSALKSRLTIIKDNSKSQVFLKMSSLQTDDTAIYYCAKHYYYGGSYAMDYWGQGTSVTVSSASTKGPSVFPLAPSSKSTSGGTAALGCLVKDYFPEPVTVSWNSGALTSGVHTFPAVLQSSGLYSLESVVTVPSSSLGTQTYICNVNHKPSNTKVDKKVEPKSCTDWSPYADQSIKVRISLKSALGDKAYEWNDNEMKLFRSSVAYAMRQYFLKVKNQMILFGEEDVRVANLKPRISFNFFVTAPKNVSDIIPRTEVEKAIRMSRSKINDAFRLNDNSLEFLGIQPTLGPPNQPPVSTSTSPTRSMAPGAVHLPQPVSTRDKTHTCPPCPAPELLGGPSVFLFPPKPKDTLMISRTPEVTCVVVDVSHEDPEVKFNWYVDGVEVHNAKTKPREEQYNSTYRVVSVLTVLHQDWLNGKEYKCKVSNKALPAPIEKTISKAKGQPREPQVCTLPPSRDELTKNQVSLSCAVKGFYPSDIAVEWESNGQPENNYKTTPPVLDSDGSFFLVSKLTVDKSRWQQGNVFSCSVMHEALHNRFTQKSLSLSPG

SEQ ID NO: 7778 - protein, 605 aa, synthetic construct
  REGION 1..605: note = FMC63_VH-CH1/N84S/Q39K/S183E/CLD201-KKRK/hole/RF
EVKLQESGPGLVAPSQSLSVTCTVSGVSLPDYGVSWIRKPPRKGLEWLGVIWGSETTYYNSALKSRLTIIKDNSKSQVFLKMSSLQTDDTAIYYCAKHYYYGGSYAMDYWGQGTSVTVSSASTKGPSVFPLAPSSKSTSGGTAALGCLVKDYFPEPVTVSWNSGALTSGVHTFPAVLQSSGLYSLESVVTVPSSSLGTQTYICNVNHKPSNTKVDKKVEPKSCTDWSPYADQSIKVRISLKSALGDKAKEWNDNEMKLFRSSVAYAMRQYFLKVKNQMILFGEEDVRVANLKPRISFNFFVTAPKNVSDIIPRTEVEKAIRMSRSKINDAFRLNDNSLEFLGIQPTLGPPNQPPVSTSTSPTRSMAPGAVHLPQPVSTRDKTHTCPPCPAPELLGGPSVFLFPPKPKDTLMISRTPEVTCVVVDVSHEDPEVKFNWYVDGVEVHNAKTKPREEQYNSTYRVVSVLTVLHQDWLNGKEYKCKVSNKALPAPIEKTISKAKGQPREPQVCTLPPSRDELTKNQVSLSCAVKGFYPSDIAVEWESNGQPENNYKTTPPVLDSDGSFFLVSKLTVDKSRWQQGNVFSCSVMHEALHNRFTQKSLSLSPG

SEQ ID NO: 7779 - protein, 605 aa, synthetic construct
  REGION 1..605: note = FMC63_VH-CH1/N84S/Q39K/S183E/CLD201-EKRK/hole/RF
EVKLQESGPGLVAPSQSLSVTCTVSGVSLPDYGVSWIRKPPRKGLEWLGVIWGSETTYYNSALKSRLTIIKDNSKSQVFLKMSSLQTDDTAIYYCAKHYYYGGSYAMDYWGQGTSVTVSSASTKGPSVFPLAPSSKSTSGGTAALGCLVKDYFPEPVTVSWNSGALTSGVHTFPAVLQSSGLYSLESVVTVPSSSLGTQTYICNVNHKPSNTKVDKKVEPKSCTDWSPYADQSIKVRISLKSALGDKAEEWNDNEMKLFRSSVAYAMRQYFLKVKNQMILFGEEDVRVANLKPRISFNFFVTAPKNVSDIIPRTEVEKAIRMSRSKINDAFRLNDNSLEFLGIQPTLGPPNQPPVSTSTSPTRSMAPGAVHLPQPVSTRDKTHTCPPCPAPELLGGPSVFLFPPKPKDTLMISRTPEVTCVVVDVSHEDPEVKFNWYVDGVEVHNAKTKPREEQYNSTYRVVSVLTVLHQDWLNGKEYKCKVSNKALPAPIEKTISKAKGQPREPQVCTLPPSRDELTKNQVSLSCAVKGFYPSDIAVEWESNGQPENNYKTTPPVLDSDGSFFLVSKLTVDKSRWQQGNVFSCSVMHEALHNRFTQKSLSLSPG

SEQ ID NO: 7780 - protein, 605 aa, synthetic construct
  REGION 1..605: note = FMC63_VH-CH1/N84S/Q39K/S183E/CLD201-YKRE/hole/RF
EVKLQESGPGLVAPSQSLSVTCTVSGVSLPDYGVSWIRKPPRKGLEWLGVIWGSETTYYNSALKSRLTIIKDNSKSQVFLKMSSLQTDDTAIYYCAKHYYYGGSYAMDYWGQGTSVTVSSASTKGPSVFPLAPSSKSTSGGTAALGCLVKDYFPEPVTVSWNSGALTSGVHTFPAVLQSSGLYSLESVVTVPSSSLGTQTYICNVNHKPSNTKVDKKVEPKSCTDWSPYADQSIKVRISLKSALGDKAYEWNDNEMKLFRSSVAYAMRQYFLKVKNQMILFGEEDVRVANLKPRISFNFFVTAPKNVSDIIPRTEVEKAIRMSRSEINDAFRLNDNSLEFLGIQPTLGPPNQPPVSTSTSPTRSMAPGAVHLPQPVSTRDKTHTCPPCPAPELLGGPSVFLFPPKPKDTLMISRTPEVTCVVVDVSHEDPEVKFNWYVDGVEVHNAKTKPREEQYNSTYRVVSVLTVLHQDWLNGKEYKCKVSNKALPAPIEKTISKAKGQPREPQVCTLPPSRDELTKNQVSLSCAVKGFYPSDIAVEWESNGQPENNYKTTPPVLDSDGSFFLVSKLTVDKSRWQQGNVFSCSVMHEALHNRFTQKSLSLSPG

SEQ ID NO: 7781 - protein, 605 aa, synthetic construct
  REGION 1..605: note = FMC63_VH-CH1/N84S/Q39K/S183E/CLD201-KKRE/hole/RF
EVKLQESGPGLVAPSQSLSVTCTVSGVSLPDYGVSWIRKPPRKGLEWLGVIWGSETTYYNSALKSRLTIIKDNSKSQVFLKMSSLQTDDTAIYYCAKHYYYGGSYAMDYWGQGTSVTVSSASTKGPSVFPLAPSSKSTSGGTAALGCLVKDYFPEPVTVSWNSGALTSGVHTFPAVLQSSGLYSLESVVTVPSSSLGTQTYICNVNHKPSNTKVDKKVEPKSCTDWSPYADQSIKVRISLKSALGDKAKEWNDNEMKLFRSSVAYAMRQYFLKVKNQMILFGEEDVRVANLKPRISFNFFVTAPKNVSDIIPRTEVEKAIRMSRSEINDAFRLNDNSLEFLGIQPTLGPPNQPPVSTSTSPTRSMAPGAVHLPQPVSTRDKTHTCPPCPAPELLGGPSVFLFPPKPKDTLMISRTPEVTCVVVDVSHEDPEVKFNWYVDGVEVHNAKTKPREEQYNSTYRVVSVLTVLHQDWLNGKEYKCKVSNKALPAPIEKTISKAKGQPREPQVCTLPPSRDELTKNQVSLSCAVKGFYPSDIAVEWESNGQPENNYKTTPPVLDSDGSFFLVSKLTVDKSRWQQGNVFSCSVMHEALHNRFTQKSLSLSPG

SEQ ID NO: 7782 - protein, 605 aa, synthetic construct
  REGION 1..605: note = FMC63_VH-CH1/N84S/Q39K/S183E/CLD201-EKRE/hole/RF
EVKLQESGPGLVAPSQSLSVTCTVSGVSLPDYGVSWIRKPPRKGLEWLGVIWGSETTYYNSALKSRLTIIKDNSKSQVFLKMSSLQTDDTAIYYCAKHYYYGGSYAMDYWGQGTSVTVSSASTKGPSVFPLAPSSKSTSGGTAALGCLVKDYFPEPVTVSWNSGALTSGVHTFPAVLQSSGLYSLESVVTVPSSSLGTQTYICNVNHKPSNTKVDKKVEPKSCTDWSPYADQSIKVRISLKSALGDKAEEWNDNEMKLFRSSVAYAMRQYFLKVKNQMILFGEEDVRVANLKPRISFNFFVTAPKNVSDIIPRTEVEKAIRMSRSEINDAFRLNDNSLEFLGIQPTLGPPNQPPVSTSTSPTRSMAPGAVHLPQPVSTRDKTHTCPPCPAPELLGGPSVFLFPPKPKDTLMISRTPEVTCVVVDVSHEDPEVKFNWYVDGVEVHNAKTKPREEQYNSTYRVVSVLTVLHQDWLNGKEYKCKVSNKALPAPIEKTISKAKGQPREPQVCTLPPSRDELTKNQVSLSCAVKGFYPSDIAVEWESNGQPENNYKTTPPVLDSDGSFFLVSKLTVDKSRWQQGNVFSCSVMHEALHNRFTQKSLSLSPG

SEQ ID NO: 7783 - protein, 605 aa, synthetic construct
  REGION 1..605: note = FMC63_VH-CH1/N84S/Q39K/S183E/CLD201-YERR/hole/RF
EVKLQESGPGLVAPSQSLSVTCTVSGVSLPDYGVSWIRKPPRKGLEWLGVIWGSETTYYNSALKSRLTIIKDNSKSQVFLKMSSLQTDDTAIYYCAKHYYYGGSYAMDYWGQGTSVTVSSASTKGPSVFPLAPSSKSTSGGTAALGCLVKDYFPEPVTVSWNSGALTSGVHTFPAVLQSSGLYSLESVVTVPSSSLGTQTYICNVNHKPSNTKVDKKVEPKSCTDWSPYADQSIKVRISLKSALGDKAYEWNDNEMELFRSSVAYAMRQYFLKVKNQMILFGEEDVRVANLKPRISFNFFVTAPKNVSDIIPRTEVEKAIRMSRSRINDAFRLNDNSLEFLGIQPTLGPPNQPPVSTSTSPTRSMAPGAVHLPQPVSTRDKTHTCPPCPAPELLGGPSVFLFPPKPKDTLMISRTPEVTCVVVDVSHEDPEVKFNWYVDGVEVHNAKTKPREEQYNSTYRVVSVLTVLHQDWLNGKEYKCKVSNKALPAPIEKTISKAKGQPREPQVCTLPPSRDELTKNQVSLSCAVKGFYPSDIAVEWESNGQPENNYKTTPPVLDSDGSFFLVSKLTVDKSRWQQGNVFSCSVMHEALHNRFTQKSLSLSPG

SEQ ID NO: 7784 - protein, 605 aa, synthetic construct
  REGION 1..605: note = FMC63_VH-CH1/N84S/Q39K/S183E/CLD201-KERR/hole/RF
EVKLQESGPGLVAPSQSLSVTCTVSGVSLPDYGVSWIRKPPRKGLEWLGVIWGSETTYYNSALKSRLTIIKDNSKSQVFLKMSSLQTDDTAIYYCAKHYYYGGSYAMDYWGQGTSVTVSSASTKGPSVFPLAPSSKSTSGGTAALGCLVKDYFPEPVTVSWNSGALTSGVHTFPAVLQSSGLYSLESVVTVPSSSLGTQTYICNVNHKPSNTKVDKKVEPKSCTDWSPYADQSIKVRISLKSALGDKAKEWNDNEMELFRSSVAYAMRQYFLKVKNQMILFGEEDVRVANLKPRISFNFFVTAPKNVSDIIPRTEVEKAIRMSRSRINDAFRLNDNSLEFLGIQPTLGPPNQPPVSTSTSPTRSMAPGAVHLPQPVSTRDKTHTCPPCPAPELLGGPSVFLFPPKPKDTLMISRTPEVTCVVVDVSHEDPEVKFNWYVDGVEVHNAKTKPREEQYNSTYRVVSVLTVLHQDWLNGKEYKCKVSNKALPAPIEKTISKAKGQPREPQVCTLPPSRDELTKNQVSLSCAVKGFYPSDIAVEWESNGQPENNYKTTPPVLDSDGSFFLVSKLTVDKSRWQQGNVFSCSVMHEALHNRFTQKSLSLSPG

SEQ ID NO: 7785 - protein, 605 aa, synthetic construct
  REGION 1..605: note = FMC63_VH-CH1/N84S/Q39K/S183E/CLD201-EERR/hole/RF
EVKLQESGPGLVAPSQSLSVTCTVSGVSLPDYGVSWIRKPPRKGLEWLGVIWGSETTYYNSALKSRLTIIKDNSKSQVFLKMSSLQTDDTAIYYCAKHYYYGGSYAMDYWGQGTSVTVSSASTKGPSVFPLAPSSKSTSGGTAALGCLVKDYFPEPVTVSWNSGALTSGVHTFPAVLQSSGLYSLESVVTVPSSSLGTQTYICNVNHKPSNTKVDKKVEPKSCTDWSPYADQSIKVRISLKSALGDKAEEWNDNEMELFRSSVAYAMRQYFLKVKNQMILFGEEDVRVANLKPRISFNFFVTAPKNVSDIIPRTEVEKAIRMSRSRINDAFRLNDNSLEFLGIQPTLGPPNQPPVSTSTSPTRSMAPGAVHLPQPVSTRDKTHTCPPCPAPELLGGPSVFLFPPKPKDTLMISRTPEVTCVVVDVSHEDPEVKFNWYVDGVEVHNAKTKPREEQYNSTYRVVSVLTVLHQDWLNGKEYKCKVSNKALPAPIEKTISKAKGQPREPQVCTLPPSRDELTKNQVSLSCAVKGFYPSDIAVEWESNGQPENNYKTTPPVLDSDGSFFLVSKLTVDKSRWQQGNVFSCSVMHEALHNRFTQKSLSLSPG

SEQ ID NO: 7786 - protein, 605 aa, synthetic construct
  REGION 1..605: note = FMC63_VH-CH1/N84S/Q39K/S183E/CLD201-YERK/hole/RF
EVKLQESGPGLVAPSQSLSVTCTVSGVSLPDYGVSWIRKPPRKGLEWLGVIWGSETTYYNSALKSRLTIIKDNSKSQVFLKMSSLQTDDTAIYYCAKHYYYGGSYAMDYWGQGTSVTVSSASTKGPSVFPLAPSSKSTSGGTAALGCLVKDYFPEPVTVSWNSGALTSGVHTFPAVLQSSGLYSLESVVTVPSSSLGTQTYICNVNHKPSNTKVDKKVEPKSCTDWSPYADQSIKVRISLKSALGDKAYEWNDNEMELFRSSVAYAMRQYFLKVKNQMILFGEEDVRVANLKPRISFNFFVTAPKNVSDIIPRTEVEKAIRMSRSKINDAFRLNDNSLEFLGIQPTLGPPNQPPVSTSTSPTRSMAPGAVHLPQPVSTRDKTHTCPPCPAPELLGGPSVFLFPPKPKDTLMISRTPEVTCVVVDVSHEDPEVKFNWYVDGVEVHNAKTKPREEQYNSTYRVVSVLTVLHQDWLNGKEYKCKVSNKALPAPIEKTISKAKGQPREPQVCTLPPSRDELTKNQVSLSCAVKGFYPSDIAVEWESNGQPENNYKTTPPVLDSDGSFFLVSKLTVDKSRWQQGNVFSCSVMHEALHNRFTQKSLSLSPG

SEQ ID NO: 7787 - protein, 605 aa, synthetic construct
  REGION 1..605: note = FMC63_VH-CH1/N84S/Q39K/S183E/CLD201-KERK/hole/RF
EVKLQESGPGLVAPSQSLSVTCTVSGVSLPDYGVSWIRKPPRKGLEWLGVIWGSETTYYNSALKSRLTIIKDNSKSQVFLKMSSLQTDDTAIYYCAKHYYYGGSYAMDYWGQGTSVTVSSASTKGPSVFPLAPSSKSTSGGTAALGCLVKDYFPEPVTVSWNSGALTSGVHTFPAVLQSSGLYSLESVVTVPSSSLGTQTYICNVNHKPSNTKVDKKVEPKSCTDWSPYADQSIKVRISLKSALGDKAKEWNDNEMELFRSSVAYAMRQYFLKVKNQMILFGEEDVRVANLKPRISFNFFVTAPKNVSDIIPRTEVEKAIRMSRSKINDAFRLNDNSLEFLGIQPTLGPPNQPPVSTSTSPTRSMAPGAVHLPQPVSTRDKTHTCPPCPAPELLGGPSVFLFPPKPKDTLMISRTPEVTCVVVDVSHEDPEVKFNWYVDGVEVHNAKTKPREEQYNSTYRVVSVLTVLHQDWLNGKEYKCKVSNKALPAPIEKTISKAKGQPREPQVCTLPPSRDELTKNQVSLSCAVKGFYPSDIAVEWESNGQPENNYKTTPPVLDSDGSFFLVSKLTVDKSRWQQGNVFSCSVMHEALHNRFTQKSLSLSPG

SEQ ID NO: 7788 - protein, 605 aa, synthetic construct
  REGION 1..605: note = FMC63_VH-CH1/N84S/Q39K/S183E/CLD201-EERK/hole/RF
EVKLQESGPGLVAPSQSLSVTCTVSGVSLPDYGVSWIRKPPRKGLEWLGVIWGSETTYYNSALKSRLTIIKDNSKSQVFLKMSSLQTDDTAIYYCAKHYYYGGSYAMDYWGQGTSVTVSSASTKGPSVFPLAPSSKSTSGGTAALGCLVKDYFPEPVTVSWNSGALTSGVHTFPAVLQSSGLYSLESVVTVPSSSLGTQTYICNVNHKPSNTKVDKKVEPKSCTDWSPYADQSIKVRISLKSALGDKAEEWNDNEMELFRSSVAYAMRQYFLKVKNQMILFGEEDVRVANLKPRISFNFFVTAPKNVSDIIPRTEVEKAIRMSRSKINDAFRLNDNSLEFLGIQPTLGPPNQPPVSTSTSPTRSMAPGAVHLPQPVSTRDKTHTCPPCPAPELLGGPSVFLFPPKPKDTLMISRTPEVTCVVVDVSHEDPEVKFNWYVDGVEVHNAKTKPREEQYNSTYRVVSVLTVLHQDWLNGKEYKCKVSNKALPAPIEKTISKAKGQPREPQVCTLPPSRDELTKNQVSLSCAVKGFYPSDIAVEWESNGQPENNYKTTPPVLDSDGSFFLVSKLTVDKSRWQQGNVFSCSVMHEALHNRFTQKSLSLSPG

SEQ ID NO: 7789 - protein, 605 aa, synthetic construct
  REGION 1..605: note = FMC63_VH-CH1/N84S/Q39K/S183E/CLD201-YERE/hole/RF
EVKLQESGPGLVAPSQSLSVTCTVSGVSLPDYGVSWIRKPPRKGLEWLGVIWGSETTYYNSALKSRLTIIKDNSKSQVFLKMSSLQTDDTAIYYCAKHYYYGGSYAMDYWGQGTSVTVSSASTKGPSVFPLAPSSKSTSGGTAALGCLVKDYFPEPVTVSWNSGALTSGVHTFPAVLQSSGLYSLESVVTVPSSSLGTQTYICNVNHKPSNTKVDKKVEPKSCTDWSPYADQSIKVRISLKSALGDKAYEWNDNEMELFRSSVAYAMRQYFLKVKNQMILFGEEDVRVANLKPRISFNFFVTAPKNVSDIIPRTEVEKAIRMSRSEINDAFRLNDNSLEFLGIQPTLGPPNQPPVSTSTSPTRSMAPGAVHLPQPVSTRDKTHTCPPCPAPELLGGPSVFLFPPKPKDTLMISRTPEVTCVVVDVSHEDPEVKFNWYVDGVEVHNAKTKPREEQYNSTYRVVSVLTVLHQDWLNGKEYKCKVSNKALPAPIEKTISKAKGQPREPQVCTLPPSRDELTKNQVSLSCAVKGFYPSDIAVEWESNGQPENNYKTTPPVLDSDGSFFLVSKLTVDKSRWQQGNVFSCSVMHEALHNRFTQKSLSLSPG

SEQ ID NO: 7790 - protein, 605 aa, synthetic construct
  REGION 1..605: note = FMC63_VH-CH1/N84S/Q39K/S183E/CLD201-KERE/hole/RF
EVKLQESGPGLVAPSQSLSVTCTVSGVSLPDYGVSWIRKPPRKGLEWLGVIWGSETTYYNSALKSRLTIIKDNSKSQVFLKMSSLQTDDTAIYYCAKHYYYGGSYAMDYWGQGTSVTVSSASTKGPSVFPLAPSSKSTSGGTAALGCLVKDYFPEPVTVSWNSGALTSGVHTFPAVLQSSGLYSLESVVTVPSSSLGTQTYICNVNHKPSNTKVDKKVEPKSCTDWSPYADQSIKVRISLKSALGDKAKEWNDNEMELFRSSVAYAMRQYFLKVKNQMILFGEEDVRVANLKPRISFNFFVTAPKNVSDIIPRTEVEKAIRMSRSEINDAFRLNDNSLEFLGIQPTLGPPNQPPVSTSTSPTRSMAPGAVHLPQPVSTRDKTHTCPPCPAPELLGGPSVFLFPPKPKDTLMISRTPEVTCVVVDVSHEDPEVKFNWYVDGVEVHNAKTKPREEQYNSTYRVVSVLTVLHQDWLNGKEYKCKVSNKALPAPIEKTISKAKGQPREPQVCTLPPSRDELTKNQVSLSCAVKGFYPSDIAVEWESNGQPENNYKTTPPVLDSDGSFFLVSKLTVDKSRWQQGNVFSCSVMHEALHNRFTQKSLSLSPG

SEQ ID NO: 7791 - protein, 605 aa, synthetic construct
  REGION 1..605: note = FMC63_VH-CH1/N84S/Q39K/S183E/CLD201-EERE/hole/RF
EVKLQESGPGLVAPSQSLSVTCTVSGVSLPDYGVSWIRKPPRKGLEWLGVIWGSETTYYNSALKSRLTIIKDNSKSQVFLKMSSLQTDDTAIYYCAKHYYYGGSYAMDYWGQGTSVTVSSASTKGPSVFPLAPSSKSTSGGTAALGCLVKDYFPEPVTVSWNSGALTSGVHTFPAVLQSSGLYSLESVVTVPSSSLGTQTYICNVNHKPSNTKVDKKVEPKSCTDWSPYADQSIKVRISLKSALGDKAEEWNDNEMELFRSSVAYAMRQYFLKVKNQMILFGEEDVRVANLKPRISFNFFVTAPKNVSDIIPRTEVEKAIRMSRSEINDAFRLNDNSLEFLGIQPTLGPPNQPPVSTSTSPTRSMAPGAVHLPQPVSTRDKTHTCPPCPAPELLGGPSVFLFPPKPKDTLMISRTPEVTCVVVDVSHEDPEVKFNWYVDGVEVHNAKTKPREEQYNSTYRVVSVLTVLHQDWLNGKEYKCKVSNKALPAPIEKTISKAKGQPREPQVCTLPPSRDELTKNQVSLSCAVKGFYPSDIAVEWESNGQPENNYKTTPPVLDSDGSFFLVSKLTVDKSRWQQGNVFSCSVMHEALHNRFTQKSLSLSPG

SEQ ID NO: 7792 - protein, 605 aa, synthetic construct
  REGION 1..605: note = FMC63_VH-CH1/N84S/Q39K/S183E/CLD201-YYKR/hole/RF
EVKLQESGPGLVAPSQSLSVTCTVSGVSLPDYGVSWIRKPPRKGLEWLGVIWGSETTYYNSALKSRLTIIKDNSKSQVFLKMSSLQTDDTAIYYCAKHYYYGGSYAMDYWGQGTSVTVSSASTKGPSVFPLAPSSKSTSGGTAALGCLVKDYFPEPVTVSWNSGALTSGVHTFPAVLQSSGLYSLESVVTVPSSSLGTQTYICNVNHKPSNTKVDKKVEPKSCTDWSPYADQSIKVRISLKSALGDKAYEWNDNEMYLFRSSVAYAMKQYFLKVKNQMILFGEEDVRVANLKPRISFNFFVTAPKNVSDIIPRTEVEKAIRMSRSRINDAFRLNDNSLEFLGIQPTLGPPNQPPVSTSTSPTRSMAPGAVHLPQPVSTRDKTHTCPPCPAPELLGGPSVFLFPPKPKDTLMISRTPEVTCVVVDVSHEDPEVKFNWYVDGVEVHNAKTKPREEQYNSTYRVVSVLTVLHQDWLNGKEYKCKVSNKALPAPIEKTISKAKGQPREPQVCTLPPSRDELTKNQVSLSCAVKGFYPSDIAVEWESNGQPENNYKTTPPVLDSDGSFFLVSKLTVDKSRWQQGNVFSCSVMHEALHNRFTQKSLSLSPG

SEQ ID NO: 7793 - protein, 605 aa, synthetic construct
  REGION 1..605: note = FMC63_VH-CH1/N84S/Q39K/S183E/CLD201-KYKR/hole/RF
EVKLQESGPGLVAPSQSLSVTCTVSGVSLPDYGVSWIRKPPRKGLEWLGVIWGSETTYYNSALKSRLTIIKDNSKSQVFLKMSSLQTDDTAIYYCAKHYYYGGSYAMDYWGQGTSVTVSSASTKGPSVFPLAPSSKSTSGGTAALGCLVKDYFPEPVTVSWNSGALTSGVHTFPAVLQSSGLYSLESVVTVPSSSLGTQTYICNVNHKPSNTKVDKKVEPKSCTDWSPYADQSIKVRISLKSALGDKAKEWNDNEMYLFRSSVAYAMKQYFLKVKNQMILFGEEDVRVANLKPRISFNFFVTAPKNVSDIIPRTEVEKAIRMSRSRINDAFRLNDNSLEFLGIQPTLGPPNQPPVSTSTSPTRSMAPGAVHLPQPVSTRDKTHTCPPCPAPELLGGPSVFLFPPKPKDTLMISRTPEVTCVVVDVSHEDPEVKFNWYVDGVEVHNAKTKPREEQYNSTYRVVSVLTVLHQDWLNGKEYKCKVSNKALPAPIEKTISKAKGQPREPQVCTLPPSRDELTKNQVSLSCAVKGFYPSDIAVEWESNGQPENNYKTTPPVLDSDGSFFLVSKLTVDKSRWQQGNVFSCSVMHEALHNRFTQKSLSLSPG

SEQ ID NO: 7794 - protein, 605 aa, synthetic construct
  REGION 1..605: note = FMC63_VH-CH1/N84S/Q39K/S183E/CLD201-EYKR/hole/RF
EVKLQESGPGLVAPSQSLSVTCTVSGVSLPDYGVSWIRKPPRKGLEWLGVIWGSETTYYNSALKSRLTIIKDNSKSQVFLKMSSLQTDDTAIYYCAKHYYYGGSYAMDYWGQGTSVTVSSASTKGPSVFPLAPSSKSTSGGTAALGCLVKDYFPEPVTVSWNSGALTSGVHTFPAVLQSSGLYSLESVVTVPSSSLGTQTYICNVNHKPSNTKVDKKVEPKSCTDWSPYADQSIKVRISLKSALGDKAEEWNDNEMYLFRSSVAYAMKQYFLKVKNQMILFGEEDVRVANLKPRISFNFFVTAPKNVSDIIPRTEVEKAIRMSRSRINDAFRLNDNSLEFLGIQPTLGPPNQPPVSTSTSPTRSMAPGAVHLPQPVSTRDKTHTCPPCPAPELLGGPSVFLFPPKPKDTLMISRTPEVTCVVVDVSHEDPEVKFNWYVDGVEVHNAKTKPREEQYNSTYRVVSVLTVLHQDWLNGKEYKCKVSNKALPAPIEKTISKAKGQPREPQVCTLPPSRDELTKNQVSLSCAVKGFYPSDIAVEWESNGQPENNYKTTPPVLDSDGSFFLVSKLTVDKSRWQQGNVFSCSVMHEALHNRFTQKSLSLSPG

SEQ ID NO: 7795 - protein, 605 aa, synthetic construct
  REGION 1..605: note = FMC63_VH-CH1/N84S/Q39K/S183E/CLD201-YYKK/hole/RF
EVKLQESGPGLVAPSQSLSVTCTVSGVSLPDYGVSWIRKPPRKGLEWLGVIWGSETTYYNSALKSRLTIIKDNSKSQVFLKMSSLQTDDTAIYYCAKHYYYGGSYAMDYWGQGTSVTVSSASTKGPSVFPLAPSSKSTSGGTAALGCLVKDYFPEPVTVSWNSGALTSGVHTFPAVLQSSGLYSLESVVTVPSSSLGTQTYICNVNHKPSNTKVDKKVEPKSCTDWSPYADQSIKVRISLKSALGDKAYEWNDNEMYLFRSSVAYAMKQYFLKVKNQMILFGEEDVRVANLKPRISFNFFVTAPKNVSDIIPRTEVEKAIRMSRSKINDAFRLNDNSLEFLGIQPTLGPPNQPPVSTSTSPTRSMAPGAVHLPQPVSTRDKTHTCPPCPAPELLGGPSVFLFPPKPKDTLMISRTPEVTCVVVDVSHEDPEVKFNWYVDGVEVHNAKTKPREEQYNSTYRVVSVLTVLHQDWLNGKEYKCKVSNKALPAPIEKTISKAKGQPREPQVCTLPPSRDELTKNQVSLSCAVKGFYPSDIAVEWESNGQPENNYKTTPPVLDSDGSFFLVSKLTVDKSRWQQGNVFSCSVMHEALHNRFTQKSLSLSPG

SEQ ID NO: 7796 - protein, 605 aa, synthetic construct
  REGION 1..605: note = FMC63_VH-CH1/N84S/Q39K/S183E/CLD201-KYKK/hole/RF
EVKLQESGPGLVAPSQSLSVTCTVSGVSLPDYGVSWIRKPPRKGLEWLGVIWGSETTYYNSALKSRLTIIKDNSKSQVFLKMSSLQTDDTAIYYCAKHYYYGGSYAMDYWGQGTSVTVSSASTKGPSVFPLAPSSKSTSGGTAALGCLVKDYFPEPVTVSWNSGALTSGVHTFPAVLQSSGLYSLESVVTVPSSSLGTQTYICNVNHKPSNTKVDKKVEPKSCTDWSPYADQSIKVRISLKSALGDKAKEWNDNEMYLFRSSVAYAMKQYFLKVKNQMILFGEEDVRVANLKPRISFNFFVTAPKNVSDIIPRTEVEKAIRMSRSKINDAFRLNDNSLEFLGIQPTLGPPNQPPVSTSTSPTRSMAPGAVHLPQPVSTRDKTHTCPPCPAPELLGGPSVFLFPPKPKDTLMISRTPEVTCVVVDVSHEDPEVKFNWYVDGVEVHNAKTKPREEQYNSTYRVVSVLTVLHQDWLNGKEYKCKVSNKALPAPIEKTISKAKGQPREPQVCTLPPSRDELTKNQVSLSCAVKGFYPSDIAVEWESNGQPENNYKTTPPVLDSDGSFFLVSKLTVDKSRWQQGNVFSCSVMHEALHNRFTQKSLSLSPG

SEQ ID NO: 7797 - protein, 605 aa, synthetic construct
  REGION 1..605: note = FMC63_VH-CH1/N84S/Q39K/S183E/CLD201-EYKK/hole/RF
EVKLQESGPGLVAPSQSLSVTCTVSGVSLPDYGVSWIRKPPRKGLEWLGVIWGSETTYYNSALKSRLTIIKDNSKSQVFLKMSSLQTDDTAIYYCAKHYYYGGSYAMDYWGQGTSVTVSSASTKGPSVFPLAPSSKSTSGGTAALGCLVKDYFPEPVTVSWNSGALTSGVHTFPAVLQSSGLYSLESVVTVPSSSLGTQTYICNVNHKPSNTKVDKKVEPKSCTDWSPYADQSIKVRISLKSALGDKAEEWNDNEMYLFRSSVAYAMKQYFLKVKNQMILFGEEDVRVANLKPRISFNFFVTAPKNVSDIIPRTEVEKAIRMSRSKINDAFRLNDNSLEFLGIQPTLGPPNQPPVSTSTSPTRSMAPGAVHLPQPVSTRDKTHTCPPCPAPELLGGPSVFLFPPKPKDTLMISRTPEVTCVVVDVSHEDPEVKFNWYVDGVEVHNAKTKPREEQYNSTYRVVSVLTVLHQDWLNGKEYKCKVSNKALPAPIEKTISKAKGQPREPQVCTLPPSRDELTKNQVSLSCAVKGFYPSDIAVEWESNGQPENNYKTTPPVLDSDGSFFLVSKLTVDKSRWQQGNVFSCSVMHEALHNRFTQKSLSLSPG

SEQ ID NO: 7798 - protein, 605 aa, synthetic construct
  REGION 1..605: note = FMC63_VH-CH1/N84S/Q39K/S183E/CLD201-YYKE/hole/RF
EVKLQESGPGLVAPSQSLSVTCTVSGVSLPDYGVSWIRKPPRKGLEWLGVIWGSETTYYNSALKSRLTIIKDNSKSQVFLKMSSLQTDDTAIYYCAKHYYYGGSYAMDYWGQGTSVTVSSASTKGPSVFPLAPSSKSTSGGTAALGCLVKDYFPEPVTVSWNSGALTSGVHTFPAVLQSSGLYSLESVVTVPSSSLGTQTYICNVNHKPSNTKVDKKVEPKSCTDWSPYADQSIKVRISLKSALGDKAYEWNDNEMYLFRSSVAYAMKQYFLKVKNQMILFGEEDVRVANLKPRISFNFFVTAPKNVSDIIPRTEVEKAIRMSRSEINDAFRLNDNSLEFLGIQPTLGPPNQPPVSTSTSPTRSMAPGAVHLPQPVSTRDKTHTCPPCPAPELLGGPSVFLFPPKPKDTLMISRTPEVTCVVVDVSHEDPEVKFNWYVDGVEVHNAKTKPREEQYNSTYRVVSVLTVLHQDWLNGKEYKCKVSNKALPAPIEKTISKAKGQPREPQVCTLPPSRDELTKNQVSLSCAVKGFYPSDIAVEWESNGQPENNYKTTPPVLDSDGSFFLVSKLTVDKSRWQQGNVFSCSVMHEALHNRFTQKSLSLSPG

SEQ ID NO: 7799 - protein, 605 aa, synthetic construct
  REGION 1..605: note = FMC63_VH-CH1/N84S/Q39K/S183E/CLD201-KYKE/hole/RF
EVKLQESGPGLVAPSQSLSVTCTVSGVSLPDYGVSWIRKPPRKGLEWLGVIWGSETTYYNSALKSRLTIIKDNSKSQVFLKMSSLQTDDTAIYYCAKHYYYGGSYAMDYWGQGTSVTVSSASTKGPSVFPLAPSSKSTSGGTAALGCLVKDYFPEPVTVSWNSGALTSGVHTFPAVLQSSGLYSLESVVTVPSSSLGTQTYICNVNHKPSNTKVDKKVEPKSCTDWSPYADQSIKVRISLKSALGDKAKEWNDNEMYLFRSSVAYAMKQYFLKVKNQMILFGEEDVRVANLKPRISFNFFVTAPKNVSDIIPRTEVEKAIRMSRSEINDAFRLNDNSLEFLGIQPTLGPPNQPPVSTSTSPTRSMAPGAVHLPQPVSTRDKTHTCPPCPAPELLGGPSVFLFPPKPKDTLMISRTPEVTCVVVDVSHEDPEVKFNWYVDGVEVHNAKTKPREEQYNSTYRVVSVLTVLHQDWLNGKEYKCKVSNKALPAPIEKTISKAKGQPREPQVCTLPPSRDELTKNQVSLSCAVKGFYPSDIAVEWESNGQPENNYKTTPPVLDSDGSFFLVSKLTVDKSRWQQGNVFSCSVMHEALHNRFTQKSLSLSPG

SEQ ID NO: 7800 - protein, 605 aa, synthetic construct
  REGION 1..605: note = FMC63_VH-CH1/N84S/Q39K/S183E/CLD201-EYKE/hole/RF
EVKLQESGPGLVAPSQSLSVTCTVSGVSLPDYGVSWIRKPPRKGLEWLGVIWGSETTYYNSALKSRLTIIKDNSKSQVFLKMSSLQTDDTAIYYCAKHYYYGGSYAMDYWGQGTSVTVSSASTKGPSVFPLAPSSKSTSGGTAALGCLVKDYFPEPVTVSWNSGALTSGVHTFPAVLQSSGLYSLESVVTVPSSSLGTQTYICNVNHKPSNTKVDKKVEPKSCTDWSPYADQSIKVRISLKSALGDKAEEWNDNEMYLFRSSVAYAMKQYFLKVKNQMILFGEEDVRVANLKPRISFNFFVTAPKNVSDIIPRTEVEKAIRMSRSEINDAFRLNDNSLEFLGIQPTLGPPNQPPVSTSTSPTRSMAPGAVHLPQPVSTRDKTHTCPPCPAPELLGGPSVFLFPPKPKDTLMISRTPEVTCVVVDVSHEDPEVKFNWYVDGVEVHNAKTKPREEQYNSTYRVVSVLTVLHQDWLNGKEYKCKVSNKALPAPIEKTISKAKGQPREPQVCTLPPSRDELTKNQVSLSCAVKGFYPSDIAVEWESNGQPENNYKTTPPVLDSDGSFFLVSKLTVDKSRWQQGNVFSCSVMHEALHNRFTQKSLSLSPG

SEQ ID NO: 7801 - protein, 605 aa, synthetic construct
  REGION 1..605: note = FMC63_VH-CH1/N84S/Q39K/S183E/CLD201-YKKR/hole/RF
EVKLQESGPGLVAPSQSLSVTCTVSGVSLPDYGVSWIRKPPRKGLEWLGVIWGSETTYYNSALKSRLTIIKDNSKSQVFLKMSSLQTDDTAIYYCAKHYYYGGSYAMDYWGQGTSVTVSSASTKGPSVFPLAPSSKSTSGGTAALGCLVKDYFPEPVTVSWNSGALTSGVHTFPAVLQSSGLYSLESVVTVPSSSLGTQTYICNVNHKPSNTKVDKKVEPKSCTDWSPYADQSIKVRISLKSALGDKAYEWNDNEMKLFRSSVAYAMKQYFLKVKNQMILFGEEDVRVANLKPRISFNFFVTAPKNVSDIIPRTEVEKAIRMSRSRINDAFRLNDNSLEFLGIQPTLGPPNQPPVSTSTSPTRSMAPGAVHLPQPVSTRDKTHTCPPCPAPELLGGPSVFLFPPKPKDTLMISRTPEVTCVVVDVSHEDPEVKFNWYVDGVEVHNAKTKPREEQYNSTYRVVSVLTVLHQDWLNGKEYKCKVSNKALPAPIEKTISKAKGQPREPQVCTLPPSRDELTKNQVSLSCAVKGFYPSDIAVEWESNGQPENNYKTTPPVLDSDGSFFLVSKLTVDKSRWQQGNVFSCSVMHEALHNRFTQKSLSLSPG

SEQ ID NO: 7802 - protein, 605 aa, synthetic construct
  REGION 1..605: note = FMC63_VH-CH1/N84S/Q39K/S183E/CLD201-KKKR/hole/RF
EVKLQESGPGLVAPSQSLSVTCTVSGVSLPDYGVSWIRKPPRKGLEWLGVIWGSETTYYNSALKSRLTIIKDNSKSQVFLKMSSLQTDDTAIYYCAKHYYYGGSYAMDYWGQGTSVTVSSASTKGPSVFPLAPSSKSTSGGTAALGCLVKDYFPEPVTVSWNSGALTSGVHTFPAVLQSSGLYSLESVVTVPSSSLGTQTYICNVNHKPSNTKVDKKVEPKSCTDWSPYADQSIKVRISLKSALGDKAKEWNDNEMKLFRSSVAYAMKQYFLKVKNQMILFGEEDVRVANLKPRISFNFFVTAPKNVSDIIPRTEVEKAIRMSRSRINDAFRLNDNSLEFLGIQPTLGPPNQPPVSTSTSPTRSMAPGAVHLPQPVSTRDKTHTCPPCPAPELLGGPSVFLFPPKPKDTLMISRTPEVTCVVVDVSHEDPEVKFNWYVDGVEVHNAKTKPREEQYNSTYRVVSVLTVLHQDWLNGKEYKCKVSNKALPAPIEKTISKAKGQPREPQVCTLPPSRDELTKNQVSLSCAVKGFYPSDIAVEWESNGQPENNYKTTPPVLDSDGSFFLVSKLTVDKSRWQQGNVFSCSVMHEALHNRFTQKSLSLSPG

SEQ ID NO: 7803 - protein, 605 aa, synthetic construct
  REGION 1..605: note = FMC63_VH-CH1/N84S/Q39K/S183E/CLD201-EKKR/hole/RF
EVKLQESGPGLVAPSQSLSVTCTVSGVSLPDYGVSWIRKPPRKGLEWLGVIWGSETTYYNSALKSRLTIIKDNSKSQVFLKMSSLQTDDTAIYYCAKHYYYGGSYAMDYWGQGTSVTVSSASTKGPSVFPLAPSSKSTSGGTAALGCLVKDYFPEPVTVSWNSGALTSGVHTFPAVLQSSGLYSLESVVTVPSSSLGTQTYICNVNHKPSNTKVDKKVEPKSCTDWSPYADQSIKVRISLKSALGDKAEEWNDNEMKLFRSSVAYAMKQYFLKVKNQMILFGEEDVRVANLKPRISFNFFVTAPKNVSDIIPRTEVEKAIRMSRSRINDAFRLNDNSLEFLGIQPTLGPPNQPPVSTSTSPTRSMAPGAVHLPQPVSTRDKTHTCPPCPAPELLGGPSVFLFPPKPKDTLMISRTPEVTCVVVDVSHEDPEVKFNWYVDGVEVHNAKTKPREEQYNSTYRVVSVLTVLHQDWLNGKEYKCKVSNKALPAPIEKTISKAKGQPREPQVCTLPPSRDELTKNQVSLSCAVKGFYPSDIAVEWESNGQPENNYKTTPPVLDSDGSFFLVSKLTVDKSRWQQGNVFSCSVMHEALHNRFTQKSLSLSPG

SEQ ID NO: 7804 - protein, 605 aa, synthetic construct
  REGION 1..605: note = FMC63_VH-CH1/N84S/Q39K/S183E/CLD201-YKKK/hole/RF
EVKLQESGPGLVAPSQSLSVTCTVSGVSLPDYGVSWIRKPPRKGLEWLGVIWGSETTYYNSALKSRLTIIKDNSKSQVFLKMSSLQTDDTAIYYCAKHYYYGGSYAMDYWGQGTSVTVSSASTKGPSVFPLAPSSKSTSGGTAALGCLVKDYFPEPVTVSWNSGALTSGVHTFPAVLQSSGLYSLESVVTVPSSSLGTQTYICNVNHKPSNTKVDKKVEPKSCTDWSPYADQSIKVRISLKSALGDKAYEWNDNEMKLFRSSVAYAMKQYFLKVKNQMILFGEEDVRVANLKPRISFNFFVTAPKNVSDIIPRTEVEKAIRMSRSKINDAFRLNDNSLEFLGIQPTLGPPNQPPVSTSTSPTRSMAPGAVHLPQPVSTRDKTHTCPPCPAPELLGGPSVFLFPPKPKDTLMISRTPEVTCVVVDVSHEDPEVKFNWYVDGVEVHNAKTKPREEQYNSTYRVVSVLTVLHQDWLNGKEYKCKVSNKALPAPIEKTISKAKGQPREPQVCTLPPSRDELTKNQVSLSCAVKGFYPSDIAVEWESNGQPENNYKTTPPVLDSDGSFFLVSKLTVDKSRWQQGNVFSCSVMHEALHNRFTQKSLSLSPG

SEQ ID NO: 7805 - protein, 605 aa, synthetic construct
  REGION 1..605: note = FMC63_VH-CH1/N84S/Q39K/S183E/CLD201-KKKK/hole/RF
EVKLQESGPGLVAPSQSLSVTCTVSGVSLPDYGVSWIRKPPRKGLEWLGVIWGSETTYYNSALKSRLTIIKDNSKSQVFLKMSSLQTDDTAIYYCAKHYYYGGSYAMDYWGQGTSVTVSSASTKGPSVFPLAPSSKSTSGGTAALGCLVKDYFPEPVTVSWNSGALTSGVHTFPAVLQSSGLYSLESVVTVPSSSLGTQTYICNVNHKPSNTKVDKKVEPKSCTDWSPYADQSIKVRISLKSALGDKAKEWNDNEMKLFRSSVAYAMKQYFLKVKNQMILFGEEDVRVANLKPRISFNFFVTAPKNVSDIIPRTEVEKAIRMSRSKINDAFRLNDNSLEFLGIQPTLGPPNQPPVSTSTSPTRSMAPGAVHLPQPVSTRDKTHTCPPCPAPELLGGPSVFLFPPKPKDTLMISRTPEVTCVVVDVSHEDPEVKFNWYVDGVEVHNAKTKPREEQYNSTYRVVSVLTVLHQDWLNGKEYKCKVSNKALPAPIEKTISKAKGQPREPQVCTLPPSRDELTKNQVSLSCAVKGFYPSDIAVEWESNGQPENNYKTTPPVLDSDGSFFLVSKLTVDKSRWQQGNVFSCSVMHEALHNRFTQKSLSLSPG

SEQ ID NO: 7806 - protein, 605 aa, synthetic construct
  REGION 1..605: note = FMC63_VH-CH1/N84S/Q39K/S183E/CLD201-EKKK/hole/RF
EVKLQESGPGLVAPSQSLSVTCTVSGVSLPDYGVSWIRKPPRKGLEWLGVIWGSETTYYNSALKSRLTIIKDNSKSQVFLKMSSLQTDDTAIYYCAKHYYYGGSYAMDYWGQGTSVTVSSASTKGPSVFPLAPSSKSTSGGTAALGCLVKDYFPEPVTVSWNSGALTSGVHTFPAVLQSSGLYSLESVVTVPSSSLGTQTYICNVNHKPSNTKVDKKVEPKSCTDWSPYADQSIKVRISLKSALGDKAEEWNDNEMKLFRSSVAYAMKQYFLKVKNQMILFGEEDVRVANLKPRISFNFFVTAPKNVSDIIPRTEVEKAIRMSRSKINDAFRLNDNSLEFLGIQPTLGPPNQPPVSTSTSPTRSMAPGAVHLPQPVSTRDKTHTCPPCPAPELLGGPSVFLFPPKPKDTLMISRTPEVTCVVVDVSHEDPEVKFNWYVDGVEVHNAKTKPREEQYNSTYRVVSVLTVLHQDWLNGKEYKCKVSNKALPAPIEKTISKAKGQPREPQVCTLPPSRDELTKNQVSLSCAVKGFYPSDIAVEWESNGQPENNYKTTPPVLDSDGSFFLVSKLTVDKSRWQQGNVFSCSVMHEALHNRFTQKSLSLSPG

SEQ ID NO: 7807 - protein, 605 aa, synthetic construct
  REGION 1..605: note = FMC63_VH-CH1/N84S/Q39K/S183E/CLD201-YKKE/hole/RF
EVKLQESGPGLVAPSQSLSVTCTVSGVSLPDYGVSWIRKPPRKGLEWLGVIWGSETTYYNSALKSRLTIIKDNSKSQVFLKMSSLQTDDTAIYYCAKHYYYGGSYAMDYWGQGTSVTVSSASTKGPSVFPLAPSSKSTSGGTAALGCLVKDYFPEPVTVSWNSGALTSGVHTFPAVLQSSGLYSLESVVTVPSSSLGTQTYICNVNHKPSNTKVDKKVEPKSCTDWSPYADQSIKVRISLKSALGDKAYEWNDNEMKLFRSSVAYAMKQYFLKVKNQMILFGEEDVRVANLKPRISFNFFVTAPKNVSDIIPRTEVEKAIRMSRSEINDAFRLNDNSLEFLGIQPTLGPPNQPPVSTSTSPTRSMAPGAVHLPQPVSTRDKTHTCPPCPAPELLGGPSVFLFPPKPKDTLMISRTPEVTCVVVDVSHEDPEVKFNWYVDGVEVHNAKTKPREEQYNSTYRVVSVLTVLHQDWLNGKEYKCKVSNKALPAPIEKTISKAKGQPREPQVCTLPPSRDELTKNQVSLSCAVKGFYPSDIAVEWESNGQPENNYKTTPPVLDSDGSFFLVSKLTVDKSRWQQGNVFSCSVMHEALHNRFTQKSLSLSPG

SEQ ID NO: 7808 - protein, 605 aa, synthetic construct
  REGION 1..605: note = FMC63_VH-CH1/N84S/Q39K/S183E/CLD201-KKKE/hole/RF
EVKLQESGPGLVAPSQSLSVTCTVSGVSLPDYGVSWIRKPPRKGLEWLGVIWGSETTYYNSALKSRLTIIKDNSKSQVFLKMSSLQTDDTAIYYCAKHYYYGGSYAMDYWGQGTSVTVSSASTKGPSVFPLAPSSKSTSGGTAALGCLVKDYFPEPVTVSWNSGALTSGVHTFPAVLQSSGLYSLESVVTVPSSSLGTQTYICNVNHKPSNTKVDKKVEPKSCTDWSPYADQSIKVRISLKSALGDKAKEWNDNEMKLFRSSVAYAMKQYFLKVKNQMILFGEEDVRVANLKPRISFNFFVTAPKNVSDIIPRTEVEKAIRMSRSEINDAFRLNDNSLEFLGIQPTLGPPNQPPVSTSTSPTRSMAPGAVHLPQPVSTRDKTHTCPPCPAPELLGGPSVFLFPPKPKDTLMISRTPEVTCVVVDVSHEDPEVKFNWYVDGVEVHNAKTKPREEQYNSTYRVVSVLTVLHQDWLNGKEYKCKVSNKALPAPIEKTISKAKGQPREPQVCTLPPSRDELTKNQVSLSCAVKGFYPSDIAVEWESNGQPENNYKTTPPVLDSDGSFFLVSKLTVDKSRWQQGNVFSCSVMHEALHNRFTQKSLSLSPG

SEQ ID NO: 7809 - protein, 605 aa, synthetic construct
  REGION 1..605: note = FMC63_VH-CH1/N84S/Q39K/S183E/CLD201-EKKE/hole/RF
EVKLQESGPGLVAPSQSLSVTCTVSGVSLPDYGVSWIRKPPRKGLEWLGVIWGSETTYYNSALKSRLTIIKDNSKSQVFLKMSSLQTDDTAIYYCAKHYYYGGSYAMDYWGQGTSVTVSSASTKGPSVFPLAPSSKSTSGGTAALGCLVKDYFPEPVTVSWNSGALTSGVHTFPAVLQSSGLYSLESVVTVPSSSLGTQTYICNVNHKPSNTKVDKKVEPKSCTDWSPYADQSIKVRISLKSALGDKAEEWNDNEMKLFRSSVAYAMKQYFLKVKNQMILFGEEDVRVANLKPRISFNFFVTAPKNVSDIIPRTEVEKAIRMSRSEINDAFRLNDNSLEFLGIQPTLGPPNQPPVSTSTSPTRSMAPGAVHLPQPVSTRDKTHTCPPCPAPELLGGPSVFLFPPKPKDTLMISRTPEVTCVVVDVSHEDPEVKFNWYVDGVEVHNAKTKPREEQYNSTYRVVSVLTVLHQDWLNGKEYKCKVSNKALPAPIEKTISKAKGQPREPQVCTLPPSRDELTKNQVSLSCAVKGFYPSDIAVEWESNGQPENNYKTTPPVLDSDGSFFLVSKLTVDKSRWQQGNVFSCSVMHEALHNRFTQKSLSLSPG

SEQ ID NO: 7810 - protein, 605 aa, synthetic construct
  REGION 1..605: note = FMC63_VH-CH1/N84S/Q39K/S183E/CLD201-YEKR/hole/RF
EVKLQESGPGLVAPSQSLSVTCTVSGVSLPDYGVSWIRKPPRKGLEWLGVIWGSETTYYNSALKSRLTIIKDNSKSQVFLKMSSLQTDDTAIYYCAKHYYYGGSYAMDYWGQGTSVTVSSASTKGPSVFPLAPSSKSTSGGTAALGCLVKDYFPEPVTVSWNSGALTSGVHTFPAVLQSSGLYSLESVVTVPSSSLGTQTYICNVNHKPSNTKVDKKVEPKSCTDWSPYADQSIKVRISLKSALGDKAYEWNDNEMELFRSSVAYAMKQYFLKVKNQMILFGEEDVRVANLKPRISFNFFVTAPKNVSDIIPRTEVEKAIRMSRSRINDAFRLNDNSLEFLGIQPTLGPPNQPPVSTSTSPTRSMAPGAVHLPQPVSTRDKTHTCPPCPAPELLGGPSVFLFPPKPKDTLMISRTPEVTCVVVDVSHEDPEVKFNWYVDGVEVHNAKTKPREEQYNSTYRVVSVLTVLHQDWLNGKEYKCKVSNKALPAPIEKTISKAKGQPREPQVCTLPPSRDELTKNQVSLSCAVKGFYPSDIAVEWESNGQPENNYKTTPPVLDSDGSFFLVSKLTVDKSRWQQGNVFSCSVMHEALHNRFTQKSLSLSPG

SEQ ID NO: 7811 - protein, 605 aa, synthetic construct
  REGION 1..605: note = FMC63_VH-CH1/N84S/Q39K/S183E/CLD201-KEKR/hole/RF
EVKLQESGPGLVAPSQSLSVTCTVSGVSLPDYGVSWIRKPPRKGLEWLGVIWGSETTYYNSALKSRLTIIKDNSKSQVFLKMSSLQTDDTAIYYCAKHYYYGGSYAMDYWGQGTSVTVSSASTKGPSVFPLAPSSKSTSGGTAALGCLVKDYFPEPVTVSWNSGALTSGVHTFPAVLQSSGLYSLESVVTVPSSSLGTQTYICNVNHKPSNTKVDKKVEPKSCTDWSPYADQSIKVRISLKSALGDKAKEWNDNEMELFRSSVAYAMKQYFLKVKNQMILFGEEDVRVANLKPRISFNFFVTAPKNVSDIIPRTEVEKAIRMSRSRINDAFRLNDNSLEFLGIQPTLGPPNQPPVSTSTSPTRSMAPGAVHLPQPVSTRDKTHTCPPCPAPELLGGPSVFLFPPKPKDTLMISRTPEVTCVVVDVSHEDPEVKFNWYVDGVEVHNAKTKPREEQYNSTYRVVSVLTVLHQDWLNGKEYKCKVSNKALPAPIEKTISKAKGQPREPQVCTLPPSRDELTKNQVSLSCAVKGFYPSDIAVEWESNGQPENNYKTTPPVLDSDGSFFLVSKLTVDKSRWQQGNVFSCSVMHEALHNRFTQKSLSLSPG

SEQ ID NO: 7812 - protein, 605 aa, synthetic construct
  REGION 1..605: note = FMC63_VH-CH1/N84S/Q39K/S183E/CLD201-EEKR/hole/RF
EVKLQESGPGLVAPSQSLSVTCTVSGVSLPDYGVSWIRKPPRKGLEWLGVIWGSETTYYNSALKSRLTIIKDNSKSQVFLKMSSLQTDDTAIYYCAKHYYYGGSYAMDYWGQGTSVTVSSASTKGPSVFPLAPSSKSTSGGTAALGCLVKDYFPEPVTVSWNSGALTSGVHTFPAVLQSSGLYSLESVVTVPSSSLGTQTYICNVNHKPSNTKVDKKVEPKSCTDWSPYADQSIKVRISLKSALGDKAEEWNDNEMELFRSSVAYAMKQYFLKVKNQMILFGEEDVRVANLKPRISFNFFVTAPKNVSDIIPRTEVEKAIRMSRSRINDAFRLNDNSLEFLGIQPTLGPPNQPPVSTSTSPTRSMAPGAVHLPQPVSTRDKTHTCPPCPAPELLGGPSVFLFPPKPKDTLMISRTPEVTCVVVDVSHEDPEVKFNWYVDGVEVHNAKTKPREEQYNSTYRVVSVLTVLHQDWLNGKEYKCKVSNKALPAPIEKTISKAKGQPREPQVCTLPPSRDELTKNQVSLSCAVKGFYPSDIAVEWESNGQPENNYKTTPPVLDSDGSFFLVSKLTVDKSRWQQGNVFSCSVMHEALHNRFTQKSLSLSPG

SEQ ID NO: 7813 - protein, 605 aa, synthetic construct
  REGION 1..605: note = FMC63_VH-CH1/N84S/Q39K/S183E/CLD201-YEKK/hole/RF
EVKLQESGPGLVAPSQSLSVTCTVSGVSLPDYGVSWIRKPPRKGLEWLGVIWGSETTYYNSALKSRLTIIKDNSKSQVFLKMSSLQTDDTAIYYCAKHYYYGGSYAMDYWGQGTSVTVSSASTKGPSVFPLAPSSKSTSGGTAALGCLVKDYFPEPVTVSWNSGALTSGVHTFPAVLQSSGLYSLESVVTVPSSSLGTQTYICNVNHKPSNTKVDKKVEPKSCTDWSPYADQSIKVRISLKSALGDKAYEWNDNEMELFRSSVAYAMKQYFLKVKNQMILFGEEDVRVANLKPRISFNFFVTAPKNVSDIIPRTEVEKAIRMSRSKINDAFRLNDNSLEFLGIQPTLGPPNQPPVSTSTSPTRSMAPGAVHLPQPVSTRDKTHTCPPCPAPELLGGPSVFLFPPKPKDTLMISRTPEVTCVVVDVSHEDPEVKFNWYVDGVEVHNAKTKPREEQYNSTYRVVSVLTVLHQDWLNGKEYKCKVSNKALPAPIEKTISKAKGQPREPQVCTLPPSRDELTKNQVSLSCAVKGFYPSDIAVEWESNGQPENNYKTTPPVLDSDGSFFLVSKLTVDKSRWQQGNVFSCSVMHEALHNRFTQKSLSLSPG

SEQ ID NO: 7814 - protein, 605 aa, synthetic construct
  REGION 1..605: note = FMC63_VH-CH1/N84S/Q39K/S183E/CLD201-KEKK/hole/RF
EVKLQESGPGLVAPSQSLSVTCTVSGVSLPDYGVSWIRKPPRKGLEWLGVIWGSETTYYNSALKSRLTIIKDNSKSQVFLKMSSLQTDDTAIYYCAKHYYYGGSYAMDYWGQGTSVTVSSASTKGPSVFPLAPSSKSTSGGTAALGCLVKDYFPEPVTVSWNSGALTSGVHTFPAVLQSSGLYSLESVVTVPSSSLGTQTYICNVNHKPSNTKVDKKVEPKSCTDWSPYADQSIKVRISLKSALGDKAKEWNDNEMELFRSSVAYAMKQYFLKVKNQMILFGEEDVRVANLKPRISFNFFVTAPKNVSDIIPRTEVEKAIRMSRSKINDAFRLNDNSLEFLGIQPTLGPPNQPPVSTSTSPTRSMAPGAVHLPQPVSTRDKTHTCPPCPAPELLGGPSVFLFPPKPKDTLMISRTPEVTCVVVDVSHEDPEVKFNWYVDGVEVHNAKTKPREEQYNSTYRVVSVLTVLHQDWLNGKEYKCKVSNKALPAPIEKTISKAKGQPREPQVCTLPPSRDELTKNQVSLSCAVKGFYPSDIAVEWESNGQPENNYKTTPPVLDSDGSFFLVSKLTVDKSRWQQGNVFSCSVMHEALHNRFTQKSLSLSPG

SEQ ID NO: 7815 - protein, 605 aa, synthetic construct
  REGION 1..605: note = FMC63_VH-CH1/N84S/Q39K/S183E/CLD201-EEKK/hole/RF
EVKLQESGPGLVAPSQSLSVTCTVSGVSLPDYGVSWIRKPPRKGLEWLGVIWGSETTYYNSALKSRLTIIKDNSKSQVFLKMSSLQTDDTAIYYCAKHYYYGGSYAMDYWGQGTSVTVSSASTKGPSVFPLAPSSKSTSGGTAALGCLVKDYFPEPVTVSWNSGALTSGVHTFPAVLQSSGLYSLESVVTVPSSSLGTQTYICNVNHKPSNTKVDKKVEPKSCTDWSPYADQSIKVRISLKSALGDKAEEWNDNEMELFRSSVAYAMKQYFLKVKNQMILFGEEDVRVANLKPRISFNFFVTAPKNVSDIIPRTEVEKAIRMSRSKINDAFRLNDNSLEFLGIQPTLGPPNQPPVSTSTSPTRSMAPGAVHLPQPVSTRDKTHTCPPCPAPELLGGPSVFLFPPKPKDTLMISRTPEVTCVVVDVSHEDPEVKFNWYVDGVEVHNAKTKPREEQYNSTYRVVSVLTVLHQDWLNGKEYKCKVSNKALPAPIEKTISKAKGQPREPQVCTLPPSRDELTKNQVSLSCAVKGFYPSDIAVEWESNGQPENNYKTTPPVLDSDGSFFLVSKLTVDKSRWQQGNVFSCSVMHEALHNRFTQKSLSLSPG

SEQ ID NO: 7816 - protein, 605 aa, synthetic construct
  REGION 1..605: note = FMC63_VH-CH1/N84S/Q39K/S183E/CLD201-YEKE/hole/RF
EVKLQESGPGLVAPSQSLSVTCTVSGVSLPDYGVSWIRKPPRKGLEWLGVIWGSETTYYNSALKSRLTIIKDNSKSQVFLKMSSLQTDDTAIYYCAKHYYYGGSYAMDYWGQGTSVTVSSASTKGPSVFPLAPSSKSTSGGTAALGCLVKDYFPEPVTVSWNSGALTSGVHTFPAVLQSSGLYSLESVVTVPSSSLGTQTYICNVNHKPSNTKVDKKVEPKSCTDWSPYADQSIKVRISLKSALGDKAYEWNDNEMELFRSSVAYAMKQYFLKVKNQMILFGEEDVRVANLKPRISFNFFVTAPKNVSDIIPRTEVEKAIRMSRSEINDAFRLNDNSLEFLGIQPTLGPPNQPPVSTSTSPTRSMAPGAVHLPQPVSTRDKTHTCPPCPAPELLGGPSVFLFPPKPKDTLMISRTPEVTCVVVDVSHEDPEVKFNWYVDGVEVHNAKTKPREEQYNSTYRVVSVLTVLHQDWLNGKEYKCKVSNKALPAPIEKTISKAKGQPREPQVCTLPPSRDELTKNQVSLSCAVKGFYPSDIAVEWESNGQPENNYKTTPPVLDSDGSFFLVSKLTVDKSRWQQGNVFSCSVMHEALHNRFTQKSLSLSPG

SEQ ID NO: 7817 - protein, 605 aa, synthetic construct
  REGION 1..605: note = FMC63_VH-CH1/N84S/Q39K/S183E/CLD201-KEKE/hole/RF
EVKLQESGPGLVAPSQSLSVTCTVSGVSLPDYGVSWIRKPPRKGLEWLGVIWGSETTYYNSALKSRLTIIKDNSKSQVFLKMSSLQTDDTAIYYCAKHYYYGGSYAMDYWGQGTSVTVSSASTKGPSVFPLAPSSKSTSGGTAALGCLVKDYFPEPVTVSWNSGALTSGVHTFPAVLQSSGLYSLESVVTVPSSSLGTQTYICNVNHKPSNTKVDKKVEPKSCTDWSPYADQSIKVRISLKSALGDKAKEWNDNEMELFRSSVAYAMKQYFLKVKNQMILFGEEDVRVANLKPRISFNFFVTAPKNVSDIIPRTEVEKAIRMSRSEINDAFRLNDNSLEFLGIQPTLGPPNQPPVSTSTSPTRSMAPGAVHLPQPVSTRDKTHTCPPCPAPELLGGPSVFLFPPKPKDTLMISRTPEVTCVVVDVSHEDPEVKFNWYVDGVEVHNAKTKPREEQYNSTYRVVSVLTVLHQDWLNGKEYKCKVSNKALPAPIEKTISKAKGQPREPQVCTLPPSRDELTKNQVSLSCAVKGFYPSDIAVEWESNGQPENNYKTTPPVLDSDGSFFLVSKLTVDKSRWQQGNVFSCSVMHEALHNRFTQKSLSLSPG

SEQ ID NO: 7818 - protein, 605 aa, synthetic construct
  REGION 1..605: note = FMC63_VH-CH1/N84S/Q39K/S183E/CLD201-EEKE/hole/RF
EVKLQESGPGLVAPSQSLSVTCTVSGVSLPDYGVSWIRKPPRKGLEWLGVIWGSETTYYNSALKSRLTIIKDNSKSQVFLKMSSLQTDDTAIYYCAKHYYYGGSYAMDYWGQGTSVTVSSASTKGPSVFPLAPSSKSTSGGTAALGCLVKDYFPEPVTVSWNSGALTSGVHTFPAVLQSSGLYSLESVVTVPSSSLGTQTYICNVNHKPSNTKVDKKVEPKSCTDWSPYADQSIKVRISLKSALGDKAEEWNDNEMELFRSSVAYAMKQYFLKVKNQMILFGEEDVRVANLKPRISFNFFVTAPKNVSDIIPRTEVEKAIRMSRSEINDAFRLNDNSLEFLGIQPTLGPPNQPPVSTSTSPTRSMAPGAVHLPQPVSTRDKTHTCPPCPAPELLGGPSVFLFPPKPKDTLMISRTPEVTCVVVDVSHEDPEVKFNWYVDGVEVHNAKTKPREEQYNSTYRVVSVLTVLHQDWLNGKEYKCKVSNKALPAPIEKTISKAKGQPREPQVCTLPPSRDELTKNQVSLSCAVKGFYPSDIAVEWESNGQPENNYKTTPPVLDSDGSFFLVSKLTVDKSRWQQGNVFSCSVMHEALHNRFTQKSLSLSPG

SEQ ID NO: 7819 - protein, 605 aa, synthetic construct
  REGION 1..605: note = FMC63_VH-CH1/N84S/Q39K/S183E/CLD201-YYER/hole/RF
EVKLQESGPGLVAPSQSLSVTCTVSGVSLPDYGVSWIRKPPRKGLEWLGVIWGSETTYYNSALKSRLTIIKDNSKSQVFLKMSSLQTDDTAIYYCAKHYYYGGSYAMDYWGQGTSVTVSSASTKGPSVFPLAPSSKSTSGGTAALGCLVKDYFPEPVTVSWNSGALTSGVHTFPAVLQSSGLYSLESVVTVPSSSLGTQTYICNVNHKPSNTKVDKKVEPKSCTDWSPYADQSIKVRISLKSALGDKAYEWNDNEMYLFRSSVAYAMEQYFLKVKNQMILFGEEDVRVANLKPRISFNFFVTAPKNVSDIIPRTEVEKAIRMSRSRINDAFRLNDNSLEFLGIQPTLGPPNQPPVSTSTSPTRSMAPGAVHLPQPVSTRDKTHTCPPCPAPELLGGPSVFLFPPKPKDTLMISRTPEVTCVVVDVSHEDPEVKFNWYVDGVEVHNAKTKPREEQYNSTYRVVSVLTVLHQDWLNGKEYKCKVSNKALPAPIEKTISKAKGQPREPQVCTLPPSRDELTKNQVSLSCAVKGFYPSDIAVEWESNGQPENNYKTTPPVLDSDGSFFLVSKLTVDKSRWQQGNVFSCSVMHEALHNRFTQKSLSLSPG

SEQ ID NO: 7820 - protein, 605 aa, synthetic construct
  REGION 1..605: note = FMC63_VH-CH1/N84S/Q39K/S183E/CLD201-KYER/hole/RF
EVKLQESGPGLVAPSQSLSVTCTVSGVSLPDYGVSWIRKPPRKGLEWLGVIWGSETTYYNSALKSRLTIIKDNSKSQVFLKMSSLQTDDTAIYYCAKHYYYGGSYAMDYWGQGTSVTVSSASTKGPSVFPLAPSSKSTSGGTAALGCLVKDYFPEPVTVSWNSGALTSGVHTFPAVLQSSGLYSLESVVTVPSSSLGTQTYICNVNHKPSNTKVDKKVEPKSCTDWSPYADQSIKVRISLKSALGDKAKEWNDNEMYLFRSSVAYAMEQYFLKVKNQMILFGEEDVRVANLKPRISFNFFVTAPKNVSDIIPRTEVEKAIRMSRSRINDAFRLNDNSLEFLGIQPTLGPPNQPPVSTSTSPTRSMAPGAVHLPQPVSTRDKTHTCPPCPAPELLGGPSVFLFPPKPKDTLMISRTPEVTCVVVDVSHEDPEVKFNWYVDGVEVHNAKTKPREEQYNSTYRVVSVLTVLHQDWLNGKEYKCKVSNKALPAPIEKTISKAKGQPREPQVCTLPPSRDELTKNQVSLSCAVKGFYPSDIAVEWESNGQPENNYKTTPPVLDSDGSFFLVSKLTVDKSRWQQGNVFSCSVMHEALHNRFTQKSLSLSPG

SEQ ID NO: 7821 - protein, 605 aa, synthetic construct
  REGION 1..605: note = FMC63_VH-CH1/N84S/Q39K/S183E/CLD201-EYER/hole/RF
EVKLQESGPGLVAPSQSLSVTCTVSGVSLPDYGVSWIRKPPRKGLEWLGVIWGSETTYYNSALKSRLTIIKDNSKSQVFLKMSSLQTDDTAIYYCAKHYYYGGSYAMDYWGQGTSVTVSSASTKGPSVFPLAPSSKSTSGGTAALGCLVKDYFPEPVTVSWNSGALTSGVHTFPAVLQSSGLYSLESVVTVPSSSLGTQTYICNVNHKPSNTKVDKKVEPKSCTDWSPYADQSIKVRISLKSALGDKAEEWNDNEMYLFRSSVAYAMEQYFLKVKNQMILFGEEDVRVANLKPRISFNFFVTAPKNVSDIIPRTEVEKAIRMSRSRINDAFRLNDNSLEFLGIQPTLGPPNQPPVSTSTSPTRSMAPGAVHLPQPVSTRDKTHTCPPCPAPELLGGPSVFLFPPKPKDTLMISRTPEVTCVVVDVSHEDPEVKFNWYVDGVEVHNAKTKPREEQYNSTYRVVSVLTVLHQDWLNGKEYKCKVSNKALPAPIEKTISKAKGQPREPQVCTLPPSRDELTKNQVSLSCAVKGFYPSDIAVEWESNGQPENNYKTTPPVLDSDGSFFLVSKLTVDKSRWQQGNVFSCSVMHEALHNRFTQKSLSLSPG

SEQ ID NO: 7822 - protein, 605 aa, synthetic construct
  REGION 1..605: note = FMC63_VH-CH1/N84S/Q39K/S183E/CLD201-YYEK/hole/RF
EVKLQESGPGLVAPSQSLSVTCTVSGVSLPDYGVSWIRKPPRKGLEWLGVIWGSETTYYNSALKSRLTIIKDNSKSQVFLKMSSLQTDDTAIYYCAKHYYYGGSYAMDYWGQGTSVTVSSASTKGPSVFPLAPSSKSTSGGTAALGCLVKDYFPEPVTVSWNSGALTSGVHTFPAVLQSSGLYSLESVVTVPSSSLGTQTYICNVNHKPSNTKVDKKVEPKSCTDWSPYADQSIKVRISLKSALGDKAYEWNDNEMYLFRSSVAYAMEQYFLKVKNQMILFGEEDVRVANLKPRISFNFFVTAPKNVSDIIPRTEVEKAIRMSRSKINDAFRLNDNSLEFLGIQPTLGPPNQPPVSTSTSPTRSMAPGAVHLPQPVSTRDKTHTCPPCPAPELLGGPSVFLFPPKPKDTLMISRTPEVTCVVVDVSHEDPEVKFNWYVDGVEVHNAKTKPREEQYNSTYRVVSVLTVLHQDWLNGKEYKCKVSNKALPAPIEKTISKAKGQPREPQVCTLPPSRDELTKNQVSLSCAVKGFYPSDIAVEWESNGQPENNYKTTPPVLDSDGSFFLVSKLTVDKSRWQQGNVFSCSVMHEALHNRFTQKSLSLSPG

SEQ ID NO: 7823 - protein, 605 aa, synthetic construct
  REGION 1..605: note = FMC63_VH-CH1/N84S/Q39K/S183E/CLD201-KYEK/hole/RF
EVKLQESGPGLVAPSQSLSVTCTVSGVSLPDYGVSWIRKPPRKGLEWLGVIWGSETTYYNSALKSRLTIIKDNSKSQVFLKMSSLQTDDTAIYYCAKHYYYGGSYAMDYWGQGTSVTVSSASTKGPSVFPLAPSSKSTSGGTAALGCLVKDYFPEPVTVSWNSGALTSGVHTFPAVLQSSGLYSLESVVTVPSSSLGTQTYICNVNHKPSNTKVDKKVEPKSCTDWSPYADQSIKVRISLKSALGDKAKEWNDNEMYLFRSSVAYAMEQYFLKVKNQMILFGEEDVRVANLKPRISFNFFVTAPKNVSDIIPRTEVEKAIRMSRSKINDAFRLNDNSLEFLGIQPTLGPPNQPPVSTSTSPTRSMAPGAVHLPQPVSTRDKTHTCPPCPAPELLGGPSVFLFPPKPKDTLMISRTPEVTCVVVDVSHEDPEVKFNWYVDGVEVHNAKTKPREEQYNSTYRVVSVLTVLHQDWLNGKEYKCKVSNKALPAPIEKTISKAKGQPREPQVCTLPPSRDELTKNQVSLSCAVKGFYPSDIAVEWESNGQPENNYKTTPPVLDSDGSFFLVSKLTVDKSRWQQGNVFSCSVMHEALHNRFTQKSLSLSPG

SEQ ID NO: 7824 - protein, 605 aa, synthetic construct
  REGION 1..605: note = FMC63_VH-CH1/N84S/Q39K/S183E/CLD201-EYEK/hole/RF
EVKLQESGPGLVAPSQSLSVTCTVSGVSLPDYGVSWIRKPPRKGLEWLGVIWGSETTYYNSALKSRLTIIKDNSKSQVFLKMSSLQTDDTAIYYCAKHYYYGGSYAMDYWGQGTSVTVSSASTKGPSVFPLAPSSKSTSGGTAALGCLVKDYFPEPVTVSWNSGALTSGVHTFPAVLQSSGLYSLESVVTVPSSSLGTQTYICNVNHKPSNTKVDKKVEPKSCTDWSPYADQSIKVRISLKSALGDKAEEWNDNEMYLFRSSVAYAMEQYFLKVKNQMILFGEEDVRVANLKPRISFNFFVTAPKNVSDIIPRTEVEKAIRMSRSKINDAFRLNDNSLEFLGIQPTLGPPNQPPVSTSTSPTRSMAPGAVHLPQPVSTRDKTHTCPPCPAPELLGGPSVFLFPPKPKDTLMISRTPEVTCVVVDVSHEDPEVKFNWYVDGVEVHNAKTKPREEQYNSTYRVVSVLTVLHQDWLNGKEYKCKVSNKALPAPIEKTISKAKGQPREPQVCTLPPSRDELTKNQVSLSCAVKGFYPSDIAVEWESNGQPENNYKTTPPVLDSDGSFFLVSKLTVDKSRWQQGNVFSCSVMHEALHNRFTQKSLSLSPG

SEQ ID NO: 7825 - protein, 605 aa, synthetic construct
  REGION 1..605: note = FMC63_VH-CH1/N84S/Q39K/S183E/CLD201-YYEE/hole/RF
EVKLQESGPGLVAPSQSLSVTCTVSGVSLPDYGVSWIRKPPRKGLEWLGVIWGSETTYYNSALKSRLTIIKDNSKSQVFLKMSSLQTDDTAIYYCAKHYYYGGSYAMDYWGQGTSVTVSSASTKGPSVFPLAPSSKSTSGGTAALGCLVKDYFPEPVTVSWNSGALTSGVHTFPAVLQSSGLYSLESVVTVPSSSLGTQTYICNVNHKPSNTKVDKKVEPKSCTDWSPYADQSIKVRISLKSALGDKAYEWNDNEMYLFRSSVAYAMEQYFLKVKNQMILFGEEDVRVANLKPRISFNFFVTAPKNVSDIIPRTEVEKAIRMSRSEINDAFRLNDNSLEFLGIQPTLGPPNQPPVSTSTSPTRSMAPGAVHLPQPVSTRDKTHTCPPCPAPELLGGPSVFLFPPKPKDTLMISRTPEVTCVVVDVSHEDPEVKFNWYVDGVEVHNAKTKPREEQYNSTYRVVSVLTVLHQDWLNGKEYKCKVSNKALPAPIEKTISKAKGQPREPQVCTLPPSRDELTKNQVSLSCAVKGFYPSDIAVEWESNGQPENNYKTTPPVLDSDGSFFLVSKLTVDKSRWQQGNVFSCSVMHEALHNRFTQKSLSLSPG

SEQ ID NO: 7826 - protein, 605 aa, synthetic construct
  REGION 1..605: note = FMC63_VH-CH1/N84S/Q39K/S183E/CLD201-KYEE/hole/RF
EVKLQESGPGLVAPSQSLSVTCTVSGVSLPDYGVSWIRKPPRKGLEWLGVIWGSETTYYNSALKSRLTIIKDNSKSQVFLKMSSLQTDDTAIYYCAKHYYYGGSYAMDYWGQGTSVTVSSASTKGPSVFPLAPSSKSTSGGTAALGCLVKDYFPEPVTVSWNSGALTSGVHTFPAVLQSSGLYSLESVVTVPSSSLGTQTYICNVNHKPSNTKVDKKVEPKSCTDWSPYADQSIKVRISLKSALGDKAKEWNDNEMYLFRSSVAYAMEQYFLKVKNQMILFGEEDVRVANLKPRISFNFFVTAPKNVSDIIPRTEVEKAIRMSRSEINDAFRLNDNSLEFLGIQPTLGPPNQPPVSTSTSPTRSMAPGAVHLPQPVSTRDKTHTCPPCPAPELLGGPSVFLFPPKPKDTLMISRTPEVTCVVVDVSHEDPEVKFNWYVDGVEVHNAKTKPREEQYNSTYRVVSVLTVLHQDWLNGKEYKCKVSNKALPAPIEKTISKAKGQPREPQVCTLPPSRDELTKNQVSLSCAVKGFYPSDIAVEWESNGQPENNYKTTPPVLDSDGSFFLVSKLTVDKSRWQQGNVFSCSVMHEALHNRFTQKSLSLSPG

SEQ ID NO: 7827 - protein, 605 aa, synthetic construct
  REGION 1..605: note = FMC63_VH-CH1/N84S/Q39K/S183E/CLD201-EYEE/hole/RF
EVKLQESGPGLVAPSQSLSVTCTVSGVSLPDYGVSWIRKPPRKGLEWLGVIWGSETTYYNSALKSRLTIIKDNSKSQVFLKMSSLQTDDTAIYYCAKHYYYGGSYAMDYWGQGTSVTVSSASTKGPSVFPLAPSSKSTSGGTAALGCLVKDYFPEPVTVSWNSGALTSGVHTFPAVLQSSGLYSLESVVTVPSSSLGTQTYICNVNHKPSNTKVDKKVEPKSCTDWSPYADQSIKVRISLKSALGDKAEEWNDNEMYLFRSSVAYAMEQYFLKVKNQMILFGEEDVRVANLKPRISFNFFVTAPKNVSDIIPRTEVEKAIRMSRSEINDAFRLNDNSLEFLGIQPTLGPPNQPPVSTSTSPTRSMAPGAVHLPQPVSTRDKTHTCPPCPAPELLGGPSVFLFPPKPKDTLMISRTPEVTCVVVDVSHEDPEVKFNWYVDGVEVHNAKTKPREEQYNSTYRVVSVLTVLHQDWLNGKEYKCKVSNKALPAPIEKTISKAKGQPREPQVCTLPPSRDELTKNQVSLSCAVKGFYPSDIAVEWESNGQPENNYKTTPPVLDSDGSFFLVSKLTVDKSRWQQGNVFSCSVMHEALHNRFTQKSLSLSPG

SEQ ID NO: 7828 - protein, 605 aa, synthetic construct
  REGION 1..605: note = FMC63_VH-CH1/N84S/Q39K/S183E/CLD201-YKER/hole/RF
EVKLQESGPGLVAPSQSLSVTCTVSGVSLPDYGVSWIRKPPRKGLEWLGVIWGSETTYYNSALKSRLTIIKDNSKSQVFLKMSSLQTDDTAIYYCAKHYYYGGSYAMDYWGQGTSVTVSSASTKGPSVFPLAPSSKSTSGGTAALGCLVKDYFPEPVTVSWNSGALTSGVHTFPAVLQSSGLYSLESVVTVPSSSLGTQTYICNVNHKPSNTKVDKKVEPKSCTDWSPYADQSIKVRISLKSALGDKAYEWNDNEMKLFRSSVAYAMEQYFLKVKNQMILFGEEDVRVANLKPRISFNFFVTAPKNVSDIIPRTEVEKAIRMSRSRINDAFRLNDNSLEFLGIQPTLGPPNQPPVSTSTSPTRSMAPGAVHLPQPVSTRDKTHTCPPCPAPELLGGPSVFLFPPKPKDTLMISRTPEVTCVVVDVSHEDPEVKFNWYVDGVEVHNAKTKPREEQYNSTYRVVSVLTVLHQDWLNGKEYKCKVSNKALPAPIEKTISKAKGQPREPQVCTLPPSRDELTKNQVSLSCAVKGFYPSDIAVEWESNGQPENNYKTTPPVLDSDGSFFLVSKLTVDKSRWQQGNVFSCSVMHEALHNRFTQKSLSLSPG

SEQ ID NO: 7829 - protein, 605 aa, synthetic construct
  REGION 1..605: note = FMC63_VH-CH1/N84S/Q39K/S183E/CLD201-KKER/hole/RF
EVKLQESGPGLVAPSQSLSVTCTVSGVSLPDYGVSWIRKPPRKGLEWLGVIWGSETTYYNSALKSRLTIIKDNSKSQVFLKMSSLQTDDTAIYYCAKHYYYGGSYAMDYWGQGTSVTVSSASTKGPSVFPLAPSSKSTSGGTAALGCLVKDYFPEPVTVSWNSGALTSGVHTFPAVLQSSGLYSLESVVTVPSSSLGTQTYICNVNHKPSNTKVDKKVEPKSCTDWSPYADQSIKVRISLKSALGDKAKEWNDNEMKLFRSSVAYAMEQYFLKVKNQMILFGEEDVRVANLKPRISFNFFVTAPKNVSDIIPRTEVEKAIRMSRSRINDAFRLNDNSLEFLGIQPTLGPPNQPPVSTSTSPTRSMAPGAVHLPQPVSTRDKTHTCPPCPAPELLGGPSVFLFPPKPKDTLMISRTPEVTCVVVDVSHEDPEVKFNWYVDGVEVHNAKTKPREEQYNSTYRVVSVLTVLHQDWLNGKEYKCKVSNKALPAPIEKTISKAKGQPREPQVCTLPPSRDELTKNQVSLSCAVKGFYPSDIAVEWESNGQPENNYKTTPPVLDSDGSFFLVSKLTVDKSRWQQGNVFSCSVMHEALHNRFTQKSLSLSPG

SEQ ID NO: 7830 - protein, 605 aa, synthetic construct
  REGION 1..605: note = FMC63_VH-CH1/N84S/Q39K/S183E/CLD201-EKER/hole/RF
EVKLQESGPGLVAPSQSLSVTCTVSGVSLPDYGVSWIRKPPRKGLEWLGVIWGSETTYYNSALKSRLTIIKDNSKSQVFLKMSSLQTDDTAIYYCAKHYYYGGSYAMDYWGQGTSVTVSSASTKGPSVFPLAPSSKSTSGGTAALGCLVKDYFPEPVTVSWNSGALTSGVHTFPAVLQSSGLYSLESVVTVPSSSLGTQTYICNVNHKPSNTKVDKKVEPKSCTDWSPYADQSIKVRISLKSALGDKAEEWNDNEMKLFRSSVAYAMEQYFLKVKNQMILFGEEDVRVANLKPRISFNFFVTAPKNVSDIIPRTEVEKAIRMSRSRINDAFRLNDNSLEFLGIQPTLGPPNQPPVSTSTSPTRSMAPGAVHLPQPVSTRDKTHTCPPCPAPELLGGPSVFLFPPKPKDTLMISRTPEVTCVVVDVSHEDPEVKFNWYVDGVEVHNAKTKPREEQYNSTYRVVSVLTVLHQDWLNGKEYKCKVSNKALPAPIEKTISKAKGQPREPQVCTLPPSRDELTKNQVSLSCAVKGFYPSDIAVEWESNGQPENNYKTTPPVLDSDGSFFLVSKLTVDKSRWQQGNVFSCSVMHEALHNRFTQKSLSLSPG

SEQ ID NO: 7831 - protein, 605 aa, synthetic construct
  REGION 1..605: note = FMC63_VH-CH1/N84S/Q39K/S183E/CLD201-YKEK/hole/RF
EVKLQESGPGLVAPSQSLSVTCTVSGVSLPDYGVSWIRKPPRKGLEWLGVIWGSETTYYNSALKSRLTIIKDNSKSQVFLKMSSLQTDDTAIYYCAKHYYYGGSYAMDYWGQGTSVTVSSASTKGPSVFPLAPSSKSTSGGTAALGCLVKDYFPEPVTVSWNSGALTSGVHTFPAVLQSSGLYSLESVVTVPSSSLGTQTYICNVNHKPSNTKVDKKVEPKSCTDWSPYADQSIKVRISLKSALGDKAYEWNDNEMKLFRSSVAYAMEQYFLKVKNQMILFGEEDVRVANLKPRISFNFFVTAPKNVSDIIPRTEVEKAIRMSRSKINDAFRLNDNSLEFLGIQPTLGPPNQPPVSTSTSPTRSMAPGAVHLPQPVSTRDKTHTCPPCPAPELLGGPSVFLFPPKPKDTLMISRTPEVTCVVVDVSHEDPEVKFNWYVDGVEVHNAKTKPREEQYNSTYRVVSVLTVLHQDWLNGKEYKCKVSNKALPAPIEKTISKAKGQPREPQVCTLPPSRDELTKNQVSLSCAVKGFYPSDIAVEWESNGQPENNYKTTPPVLDSDGSFFLVSKLTVDKSRWQQGNVFSCSVMHEALHNRFTQKSLSLSPG

SEQ ID NO: 7832 - protein, 605 aa, synthetic construct
  REGION 1..605: note = FMC63_VH-CH1/N84S/Q39K/S183E/CLD201-KKEK/hole/RF
EVKLQESGPGLVAPSQSLSVTCTVSGVSLPDYGVSWIRKPPRKGLEWLGVIWGSETTYYNSALKSRLTIIKDNSKSQVFLKMSSLQTDDTAIYYCAKHYYYGGSYAMDYWGQGTSVTVSSASTKGPSVFPLAPSSKSTSGGTAALGCLVKDYFPEPVTVSWNSGALTSGVHTFPAVLQSSGLYSLESVVTVPSSSLGTQTYICNVNHKPSNTKVDKKVEPKSCTDWSPYADQSIKVRISLKSALGDKAKEWNDNEMKLFRSSVAYAMEQYFLKVKNQMILFGEEDVRVANLKPRISFNFFVTAPKNVSDIIPRTEVEKAIRMSRSKINDAFRLNDNSLEFLGIQPTLGPPNQPPVSTSTSPTRSMAPGAVHLPQPVSTRDKTHTCPPCPAPELLGGPSVFLFPPKPKDTLMISRTPEVTCVVVDVSHEDPEVKFNWYVDGVEVHNAKTKPREEQYNSTYRVVSVLTVLHQDWLNGKEYKCKVSNKALPAPIEKTISKAKGQPREPQVCTLPPSRDELTKNQVSLSCAVKGFYPSDIAVEWESNGQPENNYKTTPPVLDSDGSFFLVSKLTVDKSRWQQGNVFSCSVMHEALHNRFTQKSLSLSPG

SEQ ID NO: 7833 - protein, 605 aa, synthetic construct
  REGION 1..605: note = FMC63_VH-CH1/N84S/Q39K/S183E/CLD201-EKEK/hole/RF
EVKLQESGPGLVAPSQSLSVTCTVSGVSLPDYGVSWIRKPPRKGLEWLGVIWGSETTYYNSALKSRLTIIKDNSKSQVFLKMSSLQTDDTAIYYCAKHYYYGGSYAMDYWGQGTSVTVSSASTKGPSVFPLAPSSKSTSGGTAALGCLVKDYFPEPVTVSWNSGALTSGVHTFPAVLQSSGLYSLESVVTVPSSSLGTQTYICNVNHKPSNTKVDKKVEPKSCTDWSPYADQSIKVRISLKSALGDKAEEWNDNEMKLFRSSVAYAMEQYFLKVKNQMILFGEEDVRVANLKPRISFNFFVTAPKNVSDIIPRTEVEKAIRMSRSKINDAFRLNDNSLEFLGIQPTLGPPNQPPVSTSTSPTRSMAPGAVHLPQPVSTRDKTHTCPPCPAPELLGGPSVFLFPPKPKDTLMISRTPEVTCVVVDVSHEDPEVKFNWYVDGVEVHNAKTKPREEQYNSTYRVVSVLTVLHQDWLNGKEYKCKVSNKALPAPIEKTISKAKGQPREPQVCTLPPSRDELTKNQVSLSCAVKGFYPSDIAVEWESNGQPENNYKTTPPVLDSDGSFFLVSKLTVDKSRWQQGNVFSCSVMHEALHNRFTQKSLSLSPG

SEQ ID NO: 7834 - protein, 605 aa, synthetic construct
  REGION 1..605: note = FMC63_VH-CH1/N84S/Q39K/S183E/CLD201-YKEE/hole/RF
EVKLQESGPGLVAPSQSLSVTCTVSGVSLPDYGVSWIRKPPRKGLEWLGVIWGSETTYYNSALKSRLTIIKDNSKSQVFLKMSSLQTDDTAIYYCAKHYYYGGSYAMDYWGQGTSVTVSSASTKGPSVFPLAPSSKSTSGGTAALGCLVKDYFPEPVTVSWNSGALTSGVHTFPAVLQSSGLYSLESVVTVPSSSLGTQTYICNVNHKPSNTKVDKKVEPKSCTDWSPYADQSIKVRISLKSALGDKAYEWNDNEMKLFRSSVAYAMEQYFLKVKNQMILFGEEDVRVANLKPRISFNFFVTAPKNVSDIIPRTEVEKAIRMSRSEINDAFRLNDNSLEFLGIQPTLGPPNQPPVSTSTSPTRSMAPGAVHLPQPVSTRDKTHTCPPCPAPELLGGPSVFLFPPKPKDTLMISRTPEVTCVVVDVSHEDPEVKFNWYVDGVEVHNAKTKPREEQYNSTYRVVSVLTVLHQDWLNGKEYKCKVSNKALPAPIEKTISKAKGQPREPQVCTLPPSRDELTKNQVSLSCAVKGFYPSDIAVEWESNGQPENNYKTTPPVLDSDGSFFLVSKLTVDKSRWQQGNVFSCSVMHEALHNRFTQKSLSLSPG

SEQ ID NO: 7835 - protein, 605 aa, synthetic construct
  REGION 1..605: note = FMC63_VH-CH1/N84S/Q39K/S183E/CLD201-KKEE/hole/RF
EVKLQESGPGLVAPSQSLSVTCTVSGVSLPDYGVSWIRKPPRKGLEWLGVIWGSETTYYNSALKSRLTIIKDNSKSQVFLKMSSLQTDDTAIYYCAKHYYYGGSYAMDYWGQGTSVTVSSASTKGPSVFPLAPSSKSTSGGTAALGCLVKDYFPEPVTVSWNSGALTSGVHTFPAVLQSSGLYSLESVVTVPSSSLGTQTYICNVNHKPSNTKVDKKVEPKSCTDWSPYADQSIKVRISLKSALGDKAKEWNDNEMKLFRSSVAYAMEQYFLKVKNQMILFGEEDVRVANLKPRISFNFFVTAPKNVSDIIPRTEVEKAIRMSRSEINDAFRLNDNSLEFLGIQPTLGPPNQPPVSTSTSPTRSMAPGAVHLPQPVSTRDKTHTCPPCPAPELLGGPSVFLFPPKPKDTLMISRTPEVTCVVVDVSHEDPEVKFNWYVDGVEVHNAKTKPREEQYNSTYRVVSVLTVLHQDWLNGKEYKCKVSNKALPAPIEKTISKAKGQPREPQVCTLPPSRDELTKNQVSLSCAVKGFYPSDIAVEWESNGQPENNYKTTPPVLDSDGSFFLVSKLTVDKSRWQQGNVFSCSVMHEALHNRFTQKSLSLSPG

SEQ ID NO: 7836 - protein, 605 aa, synthetic construct
  REGION 1..605: note = FMC63_VH-CH1/N84S/Q39K/S183E/CLD201-EKEE/hole/RF
EVKLQESGPGLVAPSQSLSVTCTVSGVSLPDYGVSWIRKPPRKGLEWLGVIWGSETTYYNSALKSRLTIIKDNSKSQVFLKMSSLQTDDTAIYYCAKHYYYGGSYAMDYWGQGTSVTVSSASTKGPSVFPLAPSSKSTSGGTAALGCLVKDYFPEPVTVSWNSGALTSGVHTFPAVLQSSGLYSLESVVTVPSSSLGTQTYICNVNHKPSNTKVDKKVEPKSCTDWSPYADQSIKVRISLKSALGDKAEEWNDNEMKLFRSSVAYAMEQYFLKVKNQMILFGEEDVRVANLKPRISFNFFVTAPKNVSDIIPRTEVEKAIRMSRSEINDAFRLNDNSLEFLGIQPTLGPPNQPPVSTSTSPTRSMAPGAVHLPQPVSTRDKTHTCPPCPAPELLGGPSVFLFPPKPKDTLMISRTPEVTCVVVDVSHEDPEVKFNWYVDGVEVHNAKTKPREEQYNSTYRVVSVLTVLHQDWLNGKEYKCKVSNKALPAPIEKTISKAKGQPREPQVCTLPPSRDELTKNQVSLSCAVKGFYPSDIAVEWESNGQPENNYKTTPPVLDSDGSFFLVSKLTVDKSRWQQGNVFSCSVMHEALHNRFTQKSLSLSPG

SEQ ID NO: 7837 - protein, 605 aa, synthetic construct
  REGION 1..605: note = FMC63_VH-CH1/N84S/Q39K/S183E/CLD201-YEER/hole/RF
EVKLQESGPGLVAPSQSLSVTCTVSGVSLPDYGVSWIRKPPRKGLEWLGVIWGSETTYYNSALKSRLTIIKDNSKSQVFLKMSSLQTDDTAIYYCAKHYYYGGSYAMDYWGQGTSVTVSSASTKGPSVFPLAPSSKSTSGGTAALGCLVKDYFPEPVTVSWNSGALTSGVHTFPAVLQSSGLYSLESVVTVPSSSLGTQTYICNVNHKPSNTKVDKKVEPKSCTDWSPYADQSIKVRISLKSALGDKAYEWNDNEMELFRSSVAYAMEQYFLKVKNQMILFGEEDVRVANLKPRISFNFFVTAPKNVSDIIPRTEVEKAIRMSRSRINDAFRLNDNSLEFLGIQPTLGPPNQPPVSTSTSPTRSMAPGAVHLPQPVSTRDKTHTCPPCPAPELLGGPSVFLFPPKPKDTLMISRTPEVTCVVVDVSHEDPEVKFNWYVDGVEVHNAKTKPREEQYNSTYRVVSVLTVLHQDWLNGKEYKCKVSNKALPAPIEKTISKAKGQPREPQVCTLPPSRDELTKNQVSLSCAVKGFYPSDIAVEWESNGQPENNYKTTPPVLDSDGSFFLVSKLTVDKSRWQQGNVFSCSVMHEALHNRFTQKSLSLSPG

SEQ ID NO: 7838 - protein, 605 aa, synthetic construct
  REGION 1..605: note = FMC63_VH-CH1/N84S/Q39K/S183E/CLD201-KEER/hole/RF
EVKLQESGPGLVAPSQSLSVTCTVSGVSLPDYGVSWIRKPPRKGLEWLGVIWGSETTYYNSALKSRLTIIKDNSKSQVFLKMSSLQTDDTAIYYCAKHYYYGGSYAMDYWGQGTSVTVSSASTKGPSVFPLAPSSKSTSGGTAALGCLVKDYFPEPVTVSWNSGALTSGVHTFPAVLQSSGLYSLESVVTVPSSSLGTQTYICNVNHKPSNTKVDKKVEPKSCTDWSPYADQSIKVRISLKSALGDKAKEWNDNEMELFRSSVAYAMEQYFLKVKNQMILFGEEDVRVANLKPRISFNFFVTAPKNVSDIIPRTEVEKAIRMSRSRINDAFRLNDNSLEFLGIQPTLGPPNQPPVSTSTSPTRSMAPGAVHLPQPVSTRDKTHTCPPCPAPELLGGPSVFLFPPKPKDTLMISRTPEVTCVVVDVSHEDPEVKFNWYVDGVEVHNAKTKPREEQYNSTYRVVSVLTVLHQDWLNGKEYKCKVSNKALPAPIEKTISKAKGQPREPQVCTLPPSRDELTKNQVSLSCAVKGFYPSDIAVEWESNGQPENNYKTTPPVLDSDGSFFLVSKLTVDKSRWQQGNVFSCSVMHEALHNRFTQKSLSLSPG

SEQ ID NO: 7839 - protein, 605 aa, synthetic construct
  REGION 1..605: note = FMC63_VH-CH1/N84S/Q39K/S183E/CLD201-EEER/hole/RF
EVKLQESGPGLVAPSQSLSVTCTVSGVSLPDYGVSWIRKPPRKGLEWLGVIWGSETTYYNSALKSRLTIIKDNSKSQVFLKMSSLQTDDTAIYYCAKHYYYGGSYAMDYWGQGTSVTVSSASTKGPSVFPLAPSSKSTSGGTAALGCLVKDYFPEPVTVSWNSGALTSGVHTFPAVLQSSGLYSLESVVTVPSSSLGTQTYICNVNHKPSNTKVDKKVEPKSCTDWSPYADQSIKVRISLKSALGDKAEEWNDNEMELFRSSVAYAMEQYFLKVKNQMILFGEEDVRVANLKPRISFNFFVTAPKNVSDIIPRTEVEKAIRMSRSRINDAFRLNDNSLEFLGIQPTLGPPNQPPVSTSTSPTRSMAPGAVHLPQPVSTRDKTHTCPPCPAPELLGGPSVFLFPPKPKDTLMISRTPEVTCVVVDVSHEDPEVKFNWYVDGVEVHNAKTKPREEQYNSTYRVVSVLTVLHQDWLNGKEYKCKVSNKALPAPIEKTISKAKGQPREPQVCTLPPSRDELTKNQVSLSCAVKGFYPSDIAVEWESNGQPENNYKTTPPVLDSDGSFFLVSKLTVDKSRWQQGNVFSCSVMHEALHNRFTQKSLSLSPG

SEQ ID NO: 7840 - protein, 605 aa, synthetic construct
  REGION 1..605: note = FMC63_VH-CH1/N84S/Q39K/S183E/CLD201-YEEK/hole/RF
EVKLQESGPGLVAPSQSLSVTCTVSGVSLPDYGVSWIRKPPRKGLEWLGVIWGSETTYYNSALKSRLTIIKDNSKSQVFLKMSSLQTDDTAIYYCAKHYYYGGSYAMDYWGQGTSVTVSSASTKGPSVFPLAPSSKSTSGGTAALGCLVKDYFPEPVTVSWNSGALTSGVHTFPAVLQSSGLYSLESVVTVPSSSLGTQTYICNVNHKPSNTKVDKKVEPKSCTDWSPYADQSIKVRISLKSALGDKAYEWNDNEMELFRSSVAYAMEQYFLKVKNQMILFGEEDVRVANLKPRISFNFFVTAPKNVSDIIPRTEVEKAIRMSRSKINDAFRLNDNSLEFLGIQPTLGPPNQPPVSTSTSPTRSMAPGAVHLPQPVSTRDKTHTCPPCPAPELLGGPSVFLFPPKPKDTLMISRTPEVTCVVVDVSHEDPEVKFNWYVDGVEVHNAKTKPREEQYNSTYRVVSVLTVLHQDWLNGKEYKCKVSNKALPAPIEKTISKAKGQPREPQVCTLPPSRDELTKNQVSLSCAVKGFYPSDIAVEWESNGQPENNYKTTPPVLDSDGSFFLVSKLTVDKSRWQQGNVFSCSVMHEALHNRFTQKSLSLSPG

SEQ ID NO: 7841 - protein, 605 aa, synthetic construct
  REGION 1..605: note = FMC63_VH-CH1/N84S/Q39K/S183E/CLD201-KEEK/hole/RF
EVKLQESGPGLVAPSQSLSVTCTVSGVSLPDYGVSWIRKPPRKGLEWLGVIWGSETTYYNSALKSRLTIIKDNSKSQVFLKMSSLQTDDTAIYYCAKHYYYGGSYAMDYWGQGTSVTVSSASTKGPSVFPLAPSSKSTSGGTAALGCLVKDYFPEPVTVSWNSGALTSGVHTFPAVLQSSGLYSLESVVTVPSSSLGTQTYICNVNHKPSNTKVDKKVEPKSCTDWSPYADQSIKVRISLKSALGDKAKEWNDNEMELFRSSVAYAMEQYFLKVKNQMILFGEEDVRVANLKPRISFNFFVTAPKNVSDIIPRTEVEKAIRMSRSKINDAFRLNDNSLEFLGIQPTLGPPNQPPVSTSTSPTRSMAPGAVHLPQPVSTRDKTHTCPPCPAPELLGGPSVFLFPPKPKDTLMISRTPEVTCVVVDVSHEDPEVKFNWYVDGVEVHNAKTKPREEQYNSTYRVVSVLTVLHQDWLNGKEYKCKVSNKALPAPIEKTISKAKGQPREPQVCTLPPSRDELTKNQVSLSCAVKGFYPSDIAVEWESNGQPENNYKTTPPVLDSDGSFFLVSKLTVDKSRWQQGNVFSCSVMHEALHNRFTQKSLSLSPG

SEQ ID NO: 7842 - protein, 605 aa, synthetic construct
  REGION 1..605: note = FMC63_VH-CH1/N84S/Q39K/S183E/CLD201-EEEK/hole/RF
EVKLQESGPGLVAPSQSLSVTCTVSGVSLPDYGVSWIRKPPRKGLEWLGVIWGSETTYYNSALKSRLTIIKDNSKSQVFLKMSSLQTDDTAIYYCAKHYYYGGSYAMDYWGQGTSVTVSSASTKGPSVFPLAPSSKSTSGGTAALGCLVKDYFPEPVTVSWNSGALTSGVHTFPAVLQSSGLYSLESVVTVPSSSLGTQTYICNVNHKPSNTKVDKKVEPKSCTDWSPYADQSIKVRISLKSALGDKAEEWNDNEMELFRSSVAYAMEQYFLKVKNQMILFGEEDVRVANLKPRISFNFFVTAPKNVSDIIPRTEVEKAIRMSRSKINDAFRLNDNSLEFLGIQPTLGPPNQPPVSTSTSPTRSMAPGAVHLPQPVSTRDKTHTCPPCPAPELLGGPSVFLFPPKPKDTLMISRTPEVTCVVVDVSHEDPEVKFNWYVDGVEVHNAKTKPREEQYNSTYRVVSVLTVLHQDWLNGKEYKCKVSNKALPAPIEKTISKAKGQPREPQVCTLPPSRDELTKNQVSLSCAVKGFYPSDIAVEWESNGQPENNYKTTPPVLDSDGSFFLVSKLTVDKSRWQQGNVFSCSVMHEALHNRFTQKSLSLSPG

SEQ ID NO: 7843 - protein, 605 aa, synthetic construct
  REGION 1..605: note = FMC63_VH-CH1/N84S/Q39K/S183E/CLD201-YEEE/hole/RF
EVKLQESGPGLVAPSQSLSVTCTVSGVSLPDYGVSWIRKPPRKGLEWLGVIWGSETTYYNSALKSRLTIIKDNSKSQVFLKMSSLQTDDTAIYYCAKHYYYGGSYAMDYWGQGTSVTVSSASTKGPSVFPLAPSSKSTSGGTAALGCLVKDYFPEPVTVSWNSGALTSGVHTFPAVLQSSGLYSLESVVTVPSSSLGTQTYICNVNHKPSNTKVDKKVEPKSCTDWSPYADQSIKVRISLKSALGDKAYEWNDNEMELFRSSVAYAMEQYFLKVKNQMILFGEEDVRVANLKPRISFNFFVTAPKNVSDIIPRTEVEKAIRMSRSEINDAFRLNDNSLEFLGIQPTLGPPNQPPVSTSTSPTRSMAPGAVHLPQPVSTRDKTHTCPPCPAPELLGGPSVFLFPPKPKDTLMISRTPEVTCVVVDVSHEDPEVKFNWYVDGVEVHNAKTKPREEQYNSTYRVVSVLTVLHQDWLNGKEYKCKVSNKALPAPIEKTISKAKGQPREPQVCTLPPSRDELTKNQVSLSCAVKGFYPSDIAVEWESNGQPENNYKTTPPVLDSDGSFFLVSKLTVDKSRWQQGNVFSCSVMHEALHNRFTQKSLSLSPG

SEQ ID NO: 7844 - protein, 605 aa, synthetic construct
  REGION 1..605: note = FMC63_VH-CH1/N84S/Q39K/S183E/CLD201-KEEE/hole/RF
EVKLQESGPGLVAPSQSLSVTCTVSGVSLPDYGVSWIRKPPRKGLEWLGVIWGSETTYYNSALKSRLTIIKDNSKSQVFLKMSSLQTDDTAIYYCAKHYYYGGSYAMDYWGQGTSVTVSSASTKGPSVFPLAPSSKSTSGGTAALGCLVKDYFPEPVTVSWNSGALTSGVHTFPAVLQSSGLYSLESVVTVPSSSLGTQTYICNVNHKPSNTKVDKKVEPKSCTDWSPYADQSIKVRISLKSALGDKAKEWNDNEMELFRSSVAYAMEQYFLKVKNQMILFGEEDVRVANLKPRISFNFFVTAPKNVSDIIPRTEVEKAIRMSRSEINDAFRLNDNSLEFLGIQPTLGPPNQPPVSTSTSPTRSMAPGAVHLPQPVSTRDKTHTCPPCPAPELLGGPSVFLFPPKPKDTLMISRTPEVTCVVVDVSHEDPEVKFNWYVDGVEVHNAKTKPREEQYNSTYRVVSVLTVLHQDWLNGKEYKCKVSNKALPAPIEKTISKAKGQPREPQVCTLPPSRDELTKNQVSLSCAVKGFYPSDIAVEWESNGQPENNYKTTPPVLDSDGSFFLVSKLTVDKSRWQQGNVFSCSVMHEALHNRFTQKSLSLSPG

SEQ ID NO: 7845 - protein, 605 aa, synthetic construct
  REGION 1..605: note = FMC63_VH-CH1/N84S/Q39K/S183E/CLD201-EEEE/hole/RF
EVKLQESGPGLVAPSQSLSVTCTVSGVSLPDYGVSWIRKPPRKGLEWLGVIWGSETTYYNSALKSRLTIIKDNSKSQVFLKMSSLQTDDTAIYYCAKHYYYGGSYAMDYWGQGTSVTVSSASTKGPSVFPLAPSSKSTSGGTAALGCLVKDYFPEPVTVSWNSGALTSGVHTFPAVLQSSGLYSLESVVTVPSSSLGTQTYICNVNHKPSNTKVDKKVEPKSCTDWSPYADQSIKVRISLKSALGDKAEEWNDNEMELFRSSVAYAMEQYFLKVKNQMILFGEEDVRVANLKPRISFNFFVTAPKNVSDIIPRTEVEKAIRMSRSEINDAFRLNDNSLEFLGIQPTLGPPNQPPVSTSTSPTRSMAPGAVHLPQPVSTRDKTHTCPPCPAPELLGGPSVFLFPPKPKDTLMISRTPEVTCVVVDVSHEDPEVKFNWYVDGVEVHNAKTKPREEQYNSTYRVVSVLTVLHQDWLNGKEYKCKVSNKALPAPIEKTISKAKGQPREPQVCTLPPSRDELTKNQVSLSCAVKGFYPSDIAVEWESNGQPENNYKTTPPVLDSDGSFFLVSKLTVDKSRWQQGNVFSCSVMHEALHNRFTQKSLSLSPG

SEQ ID NO: 7846 - protein, 214 aa, synthetic construct; identical to SEQ ID NO: 740
  REGION 1..214: note = FMC63_VK-CK/Q38E/V133K

SEQ ID NO: 7847 - protein, 244 aa, synthetic construct
  REGION 1..244: note = Fc6/knob
MLLLARCLLLVLVSSLLVCSGLACPPCPAPELLGGPSVFLFPPKPKDTLMISRTPEVTCVVVDVSHEDPEVKFNWYVDGVEVHNAKTKPREEQYNSTYRVVSVLTVLHQDWLNGKEYKCKVSNKALPAPIEKTISKAKGQPREPQVYTLPPCRDELTKNQVSLWCLVKGFYPSDIAVEWESNGQPENNYKTTPPVLDSDGSFFLYSKLTVDKSRWQQGNVFSCSVMHEALHNHYTQKSLSLSPG

SEQ ID NO: 7848 - protein, 830 aa, synthetic construct
  source 1..830: note FMC47_VH-CH1/N84S/Q39K/S183E/Sp34_VL-X-CH1/Q38K/S183K/CLD20 1/hole/LALAGR/YTE/RF
QVQLVQSGGGVVQPGRSLRLSCAASGVSLPDYGVSWVRKAPGKGLEWVAVIWGSETTYYNSALKSRFTISRDNSKNTLYLQMSSLRAEDTAVYYCAKHYYYGGSFAMDYWGQGTLVTVSSASTKGPSVFPLAPSSKSTSGGTAALGCLVKDYFPEPVTVSWNSGALTSGVHTFPAVLQSSGLYSLESVVTVPSSSLGTQTYICNVNHKPSNTKVDKKVEPKSCDGGGGSGGGGSQAVVTQEPSLTVSPGGTVTLTCGSSTGAVTTSNYANWVQKKPGQAFRGLIGGTNKRAPGTPARFSGSLLGGKAALTLSGAQPEDEAEYYCALWYSNLWVFGGGTKLTVLSSASTKGPSVFPLAPSSKSTSGGTAALGCLVKDYFPEPVTVSWNSGALTSGVHTFPAVLQSSGLYSLKSVVTVPSSSLGTQTYICNVNHKPSNTKVDKKVEPKSCTDWSPYADQSIKVRISLKSALGDKAYEWNDNEMYLFRSSVAYAMRQYFLKVKNQMILFGEEDVRVANLKPRISFNFFVTAPKNVSDIIPRTEVEKAIRMSRSRINDAFRLNDNSLEFLGIQPTLGPPNQPPVSTSTSPTRSMAPGAVHLPQPVSTRDKTHTCPPCPAPEAARGPSVFLFPPKPKDTLYITREPEVTCVVVDVSHEDPEVKFNWYVDGVEVHNAKTKPREEQYNSTYRVVSVLTVLHQDWLNGKEYKCKVSNKALPAPIEKTISKAKGQPREPQVCTLPPSRDELTKNQVSLSCAVKGFYPSDIAVEWESNGQPENNYKTTPPVLDSDGSFFLVSKLTVDKSRWQQGNVFSCSVMHEALHNRFTQKSLSLSPG

SEQ ID NO: 7849 - protein, 449 aa, synthetic construct
  source 1..449: note = FMC47_VH-CH1/N84S/Q39K/S183E/knob/LALAGR/YTE
QVQLVQSGGGVVQPGRSLRLSCAASGVSLPDYGVSWVRKAPGKGLEWVAVIWGSETTYYNSALKSRFTISRDNSKNTLYLQMSSLRAEDTAVYYCAKHYYYGGSFAMDYWGQGTLVTVSSASTKGPSVFPLAPSSKSTSGGTAALGCLVKDYFPEPVTVSWNSGALTSGVHTFPAVLQSSGLYSLESVVTVPSSSLGTQTYICNVNHKPSNTKVDKKVEPKSCDKTHTCPPCPAPEAARGPSVFLFPPKPKDTLYITREPEVTCVVVDVSHEDPEVKFNWYVDGVEVHNAKTKPREEQYNSTYRVVSVLTVLHQDWLNGKEYKCKVSNKALPAPIEKTISKAKGQPREPQVYTLPPCRDELTKNQVSLWCLVKGFYPSDIAVEWESNGQPENNYKTTPPVLDSDGSFFLYSKLTVDKSRWQQGNVFSCSVMHEALHNHYTQKSLSLSPG

SEQ ID NO: 7850 - protein, 830 aa, synthetic construct
  source 1..830: note Sp34_VL-X-CH1/Q38K/S183K/FMC47_VH-CH1/N84S/Q39K/S183E/CLD20 1/hole/LALAGR/YTE/RF
QAVVTQEPSLTVSPGGTVTLTCGSSTGAVTTSNYANWVQKKPGQAFRGLIGGTNKRAPGTPARFSGSLLGGKAALTLSGAQPEDEAEYYCALWYSNLWVFGGGTKLTVLSSASTKGPSVFPLAPSSKSTSGGTAALGCLVKDYFPEPVTVSWNSGALTSGVHTFPAVLQSSGLYSLKSVVTVPSSSLGTQTYICNVNHKPSNTKVDKKVEPKSCDGGGGSGGGGSQVQLVQSGGGVVQPGRSLRLSCAASGVSLPDYGVSWVRKAPGKGLEWVAVIWGSETTYYNSALKSRFTISRDNSKNTLYLQMSSLRAEDTAVYYCAKHYYYGGSFAMDYWGQGTLVTVSSASTKGPSVFPLAPSSKSTSGGTAALGCLVKDYFPEPVTVSWNSGALTSGVHTFPAVLQSSGLYSLESVVTVPSSSLGTQTYICNVNHKPSNTKVDKKVEPKSCTDWSPYADQSIKVRISLKSALGDKAYEWNDNEMYLFRSSVAYAMRQYFLKVKNQMILFGEEDVRVANLKPRISFNFFVTAPKNVSDIIPRTEVEKAIRMSRSRINDAFRLNDNSLEFLGIQPTLGPPNQPPVSTSTSPTRSMAPGAVHLPQPVSTRDKTHTCPPCPAPEAARGPSVFLFPPKPKDTLYITREPEVTCVVVDVSHEDPEVKFNWYVDGVEVHNAKTKPREEQYNSTYRVVSVLTVLHQDWLNGKEYKCKVSNKALPAPIEKTISKAKGQPREPQVCTLPPSRDELTKNQVSLSCAVKGFYPSDIAVEWESNGQPENNYKTTPPVLDSDGSFFLVSKLTVDKSRWQQGNVFSCSVMHEALHNRFTQKSLSLSPG

SEQ ID NO: 7851 - protein, 221 aa, synthetic construct
  source 1..221: note = Fc6/knob/LALAGR/YTE
CPPCPAPEAARGPSVFLFPPKPKDTLYITREPEVTCVVVDVSHEDPEVKFNWYVDGVEVHNAKTKPREEQYNSTYRVVSVLTVLHQDWLNGKEYKCKVSNKALPAPIEKTISKAKGQPREPQVYTLPPCRDELTKNQVSLWCLVKGFYPSDIAVEWESNGQPENNYKTTPPVLDSDGSFFLYSKLTVDKSRWQQGNVFSCSVMHEALHNHYTQKSLSLSPG

SEQ ID NO: 7852 - protein, 596 aa, synthetic construct
  source 1..596: note = Sp34_VL-X-CH1/Q38K/S183K/CLD201/hole/LALAGR/YTE/RF
QAVVTQEPSLTVSPGGTVTLTCGSSTGAVTTSNYANWVQKKPGQAFRGLIGGTNKRAPGTPARFSGSLLGGKAALTLSGAQPEDEAEYYCALWYSNLWVFGGGTKLTVLSSASTKGPSVFPLAPSSKSTSGGTAALGCLVKDYFPEPVTVSWNSGALTSGVHTFPAVLQSSGLYSLKSVVTVPSSSLGTQTYICNVNHKPSNTKVDKKVEPKSCTDWSPYADQSIKVRISLKSALGDKAYEWNDNEMYLFRSSVAYAMRQYFLKVKNQMILFGEEDVRVANLKPRISFNFFVTAPKNVSDIIPRTEVEKAIRMSRSRINDAFRLNDNSLEFLGIQPTLGPPNQPPVSTSTSPTRSMAPGAVHLPQPVSTRDKTHTCPPCPAPEAARGPSVFLFPPKPKDTLYITREPEVTCVVVDVSHEDPEVKFNWYVDGVEVHNAKTKPREEQYNSTYRVVSVLTVLHQDWLNGKEYKCKVSNKALPAPIEKTISKAKGQPREPQVCTLPPSRDELTKNQVSLSCAVKGFYPSDIAVEWESNGQPENNYKTTPPVLDSDGSFFLVSKLTVDKSRWQQGNVFSCSVMHEALHNRFTQKSLSLSPG

SEQ ID NO: 7853 - protein, 674 aa, synthetic construct
  source 1..674: note FMC47_VH-CH1/N84S/Q39K/S183E/Sp34_VL-X-CH1/Q38K/S183K/hole/ LALAGR/YTE/RF
QVQLVQSGGGVVQPGRSLRLSCAASGVSLPDYGVSWVRKAPGKGLEWVAVIWGSETTYYNSALKSRFTISRDNSKNTLYLQMSSLRAEDTAVYYCAKHYYYGGSFAMDYWGQGTLVTVSSASTKGPSVFPLAPSSKSTSGGTAALGCLVKDYFPEPVTVSWNSGALTSGVHTFPAVLQSSGLYSLESVVTVPSSSLGTQTYICNVNHKPSNTKVDKKVEPKSCDGGGGSGGGGSQAVVTQEPSLTVSPGGTVTLTCGSSTGAVTTSNYANWVQKKPGQAFRGLIGGTNKRAPGTPARFSGSLLGGKAALTLSGAQPEDEAEYYCALWYSNLWVFGGGTKLTVLSSASTKGPSVFPLAPSSKSTSGGTAALGCLVKDYFPEPVTVSWNSGALTSGVHTFPAVLQSSGLYSLKSVVTVPSSSLGTQTYICNVNHKPSNTKVDKKVEPKSCDKTHTCPPCPAPEAARGPSVFLFPPKPKDTLYITREPEVTCVVVDVSHEDPEVKFNWYVDGVEVHNAKTKPREEQYNSTYRVVSVLTVLHQDWLNGKEYKCKVSNKALPAPIEKTISKAKGQPREPQVCTLPPSRDELTKNQVSLSCAVKGFYPSDIAVEWESNGQPENNYKTTPPVLDSDGSFFLVSKLTVDKSRWQQGNVFSCSVMHEALHNRFTQKSLSLSPG

SEQ ID NO: 7854 - protein, 831 aa, synthetic construct
  source 1..831: note Ta_VH-CH1/Q39K/S183E/Sp34_VL-X-CH1/Q38K/S183K/CLD201/hole/L ALAGR/YTE/RF
EVQLVESGGGLVKPGGSLKLSCAASGYTFTSYVMHWVRKAPGKGLEWIGYINPYNDGTKYNEKFQGRVTISSDKSISTAYMELSSLRSEDTAMYYCARGTYYYGTRVFDYWGQGTLVTVSSASTKGPSVFPLAPSSKSTSGGTAALGCLVKDYFPEPVTVSWNSGALTSGVHTFPAVLQSSGLYSLESVVTVPSSSLGTQTYICNVNHKPSNTKVDKKVEPKSCDGGGGSGGGGSQAVVTQEPSLTVSPGGTVTLTCGSSTGAVTTSNYANWVQKKPGQAFRGLIGGTNKRAPGTPARFSGSLLGGKAALTLSGAQPEDEAEYYCALWYSNLWVFGGGTKLTVLSSASTKGPSVFPLAPSSKSTSGGTAALGCLVKDYFPEPVTVSWNSGALTSGVHTFPAVLQSSGLYSLKSVVTVPSSSLGTQTYICNVNHKPSNTKVDKKVEPKSCTDWSPYADQSIKVRISLKSALGDKAYEWNDNEMYLFRSSVAYAMRQYFLKVKNQMILFGEEDVRVANLKPRISFNFFVTAPKNVSDIIPRTEVEKAIRMSRSRINDAFRLNDNSLEFLGIQPTLGPPNQPPVSTSTSPTRSMAPGAVHLPQPVSTRDKTHTCPPCPAPEAARGPSVFLFPPKPKDTLYITREPEVTCVVVDVSHEDPEVKFNWYVDGVEVHNAKTKPREEQYNSTYRVVSVLTVLHQDWLNGKEYKCKVSNKALPAPIEKTISKAKGQPREPQVCTLPPSRDELTKNQVSLSCAVKGFYPSDIAVEWESNGQPENNYKTTPPVLDSDGSFFLVSKLTVDKSRWQQGNVFSCSVMHEALHNRFTQKSLSLSPG

SEQ ID NO: 7855 - protein, 450 aa, synthetic construct
  source 1..450: note = Ta_VH-CH1/Q39K/S183E/knob/LALAGR/YTE
EVQLVESGGGLVKPGGSLKLSCAASGYTFTSYVMHWVRKAPGKGLEWIGYINPYNDGTKYNEKFQGRVTISSDKSISTAYMELSSLRSEDTAMYYCARGTYYYGTRVFDYWGQGTLVTVSSASTKGPSVFPLAPSSKSTSGGTAALGCLVKDYFPEPVTVSWNSGALTSGVHTFPAVLQSSGLYSLESVVTVPSSSLGTQTYICNVNHKPSNTKVDKKVEPKSCDKTHTCPPCPAPEAARGPSVFLFPPKPKDTLYITREPEVTCVVVDVSHEDPEVKFNWYVDGVEVHNAKTKPREEQYNSTYRVVSVLTVLHQDWLNGKEYKCKVSNKALPAPIEKTISKAKGQPREPQVYTLPPCRDELTKNQVSLWCLVKGFYPSDIAVEWESNGQPENNYKTTPPVLDSDGSFFLYSKLTVDKSRWQQGNVFSCSVMHEALHNHYTQKSLSLSPG

SEQ ID NO: 7856 - protein, 831 aa, synthetic construct
  source 1..831: note Sp34_VL-X-CH1/Q38K/S183K/Ta_VH-CH1/Q39K/S183E/CLD201/hole/L ALAGR/YTE/RF
QAVVTQEPSLTVSPGGTVTLTCGSSTGAVTTSNYANWVQKKPGQAFRGLIGGTNKRAPGTPARFSGSLLGGKAALTLSGAQPEDEAEYYCALWYSNLWVFGGGTKLTVLSSASTKGPSVFPLAPSSKSTSGGTAALGCLVKDYFPEPVTVSWNSGALTSGVHTFPAVLQSSGLYSLKSVVTVPSSSLGTQTYICNVNHKPSNTKVDKKVEPKSCDGGGGSGGGGSEVQLVESGGGLVKPGGSLKLSCAASGYTFTSYVMHWVRKAPGKGLEWIGYINPYNDGTKYNEKFQGRVTISSDKSISTAYMELSSLRSEDTAMYYCARGTYYYGTRVFDYWGQGTLVTVSSASTKGPSVFPLAPSSKSTSGGTAALGCLVKDYFPEPVTVSWNSGALTSGVHTFPAVLQSSGLYSLESVVTVPSSSLGTQTYICNVNHKPSNTKVDKKVEPKSCTDWSPYADQSIKVRISLKSALGDKAYEWNDNEMYLFRSSVAYAMRQYFLKVKNQMILFGEEDVRVANLKPRISFNFFVTAPKNVSDIIPRTEVEKAIRMSRSRINDAFRLNDNSLEFLGIQPTLGPPNQPPVSTSTSPTRSMAPGAVHLPQPVSTRDKTHTCPPCPAPEAARGPSVFLFPPKPKDTLYITREPEVTCVVVDVSHEDPEVKFNWYVDGVEVHNAKTKPREEQYNSTYRVVSVLTVLHQDWLNGKEYKCKVSNKALPAPIEKTISKAKGQPREPQVCTLPPSRDELTKNQVSLSCAVKGFYPSDIAVEWESNGQPENNYKTTPPVLDSDGSFFLVSKLTVDKSRWQQGNVFSCSVMHEALHNRFTQKSLSLSPG

SEQ ID NO: 7857 - protein, 675 aa, synthetic construct
  source 1..675: note Ta_VH-CH1/Q39K/S183E/Sp34_VL-X-CH1/Q38K/S183K/hole/LALAGR/Y TE/RF
EVQLVESGGGLVKPGGSLKLSCAASGYTFTSYVMHWVRKAPGKGLEWIGYINPYNDGTKYNEKFQGRVTISSDKSISTAYMELSSLRSEDTAMYYCARGTYYYGTRVFDYWGQGTLVTVSSASTKGPSVFPLAPSSKSTSGGTAALGCLVKDYFPEPVTVSWNSGALTSGVHTFPAVLQSSGLYSLESVVTVPSSSLGTQTYICNVNHKPSNTKVDKKVEPKSCDGGGGSGGGGSQAVVTQEPSLTVSPGGTVTLTCGSSTGAVTTSNYANWVQKKPGQAFRGLIGGTNKRAPGTPARFSGSLLGGKAALTLSGAQPEDEAEYYCALWYSNLWVFGGGTKLTVLSSASTKGPSVFPLAPSSKSTSGGTAALGCLVKDYFPEPVTVSWNSGALTSGVHTFPAVLQSSGLYSLKSVVTVPSSSLGTQTYICNVNHKPSNTKVDKKVEPKSCDKTHTCPPCPAPEAARGPSVFLFPPKPKDTLYITREPEVTCVVVDVSHEDPEVKFNWYVDGVEVHNAKTKPREEQYNSTYRVVSVLTVLHQDWLNGKEYKCKVSNKALPAPIEKTISKAKGQPREPQVCTLPPSRDELTKNQVSLSCAVKGFYPSDIAVEWESNGQPENNYKTTPPVLDSDGSFFLVSKLTVDKSRWQQGNVFSCSVMHEALHNRFTQKSLSLSPG

SEQ ID NO: 7858 - protein, 830 aa, synthetic construct
  source 1..830: note FMC47_VH-CH1/N84S/Q39K/S183E/Sp34_VL-X-CH1/Q38K/S183K/CLD20 1/hole/LSLTGR/YTE/RF
QVQLVQSGGGVVQPGRSLRLSCAASGVSLPDYGVSWVRKAPGKGLEWVAVIWGSETTYYNSALKSRFTISRDNSKNTLYLQMSSLRAEDTAVYYCAKHYYYGGSFAMDYWGQGTLVTVSSASTKGPSVFPLAPSSKSTSGGTAALGCLVKDYFPEPVTVSWNSGALTSGVHTFPAVLQSSGLYSLESVVTVPSSSLGTQTYICNVNHKPSNTKVDKKVEPKSCDGGGGSGGGGSQAVVTQEPSLTVSPGGTVTLTCGSSTGAVTTSNYANWVQKKPGQAFRGLIGGTNKRAPGTPARFSGSLLGGKAALTLSGAQPEDEAEYYCALWYSNLWVFGGGTKLTVLSSASTKGPSVFPLAPSSKSTSGGTAALGCLVKDYFPEPVTVSWNSGALTSGVHTFPAVLQSSGLYSLKSVVTVPSSSLGTQTYICNVNHKPSNTKVDKKVEPKSCTDWSPYADQSIKVRISLKSALGDKAYEWNDNEMYLFRSSVAYAMRQYFLKVKNQMILFGEEDVRVANLKPRISFNFFVTAPKNVSDIIPRTEVEKAIRMSRSRINDAFRLNDNSLEFLGIQPTLGPPNQPPVSTSTSPTRSMAPGAVHLPQPVSTRDKTHTCPPCPAPESTRGPSVFLFPPKPKDTLYITREPEVTCVVVDVSHEDPEVKFNWYVDGVEVHNAKTKPREEQYNSTYRVVSVLTVLHQDWLNGKEYKCKVSNKALPAPIEKTISKAKGQPREPQVCTLPPSRDELTKNQVSLSCAVKGFYPSDIAVEWESNGQPENNYKTTPPVLDSDGSFFLVSKLTVDKSRWQQGNVFSCSVMHEALHNRFTQKSLSLSPG

SEQ ID NO: 7859 - protein, 449 aa, synthetic construct
  source 1..449: note = FMC47_VH-CH1/N84S/Q39K/S183E/knob/LSLTGR/YTE
QVQLVQSGGGVVQPGRSLRLSCAASGVSLPDYGVSWVRKAPGKGLEWVAVIWGSETTYYNSALKSRFTISRDNSKNTLYLQMSSLRAEDTAVYYCAKHYYYGGSFAMDYWGQGTLVTVSSASTKGPSVFPLAPSSKSTSGGTAALGCLVKDYFPEPVTVSWNSGALTSGVHTFPAVLQSSGLYSLESVVTVPSSSLGTQTYICNVNHKPSNTKVDKKVEPKSCDKTHTCPPCPAPESTRGPSVFLFPPKPKDTLYITREPEVTCVVVDVSHEDPEVKFNWYVDGVEVHNAKTKPREEQYNSTYRVVSVLTVLHQDWLNGKEYKCKVSNKALPAPIEKTISKAKGQPREPQVYTLPPCRDELTKNQVSLWCLVKGFYPSDIAVEWESNGQPENNYKTTPPVLDSDGSFFLYSKLTVDKSRWQQGNVFSCSVMHEALHNHYTQKSLSLSPG

SEQ ID NO: 7860 - protein, 830 aa, synthetic construct
  source 1..830: note Sp34_VL-X-CH1/Q38K/S183K/FMC47_VH-CH1/N84S/Q39K/S183E/CLD20 1/hole/LSLTGR/YTE/RF
QAVVTQEPSLTVSPGGTVTLTCGSSTGAVTTSNYANWVQKKPGQAFRGLIGGTNKRAPGTPARFSGSLLGGKAALTLSGAQPEDEAEYYCALWYSNLWVFGGGTKLTVLSSASTKGPSVFPLAPSSKSTSGGTAALGCLVKDYFPEPVTVSWNSGALTSGVHTFPAVLQSSGLYSLKSVVTVPSSSLGTQTYICNVNHKPSNTKVDKKVEPKSCDGGGGSGGGGSQVQLVQSGGGVVQPGRSLRLSCAASGVSLPDYGVSWVRKAPGKGLEWVAVIWGSETTYYNSALKSRFTISRDNSKNTLYLQMSSLRAEDTAVYYCAKHYYYGGSFAMDYWGQGTLVTVSSASTKGPSVFPLAPSSKSTSGGTAALGCLVKDYFPEPVTVSWNSGALTSGVHTFPAVLQSSGLYSLESVVTVPSSSLGTQTYICNVNHKPSNTKVDKKVEPKSCTDWSPYADQSIKVRISLKSALGDKAYEWNDNEMYLFRSSVAYAMRQYFLKVKNQMILFGEEDVRVANLKPRISFNFFVTAPKNVSDIIPRTEVEKAIRMSRSRINDAFRLNDNSLEFLGIQPTLGPPNQPPVSTSTSPTRSMAPGAVHLPQPVSTRDKTHTCPPCPAPESTRGPSVFLFPPKPKDTLYITREPEVTCVVVDVSHEDPEVKFNWYVDGVEVHNAKTKPREEQYNSTYRVVSVLTVLHQDWLNGKEYKCKVSNKALPAPIEKTISKAKGQPREPQVCTLPPSRDELTKNQVSLSCAVKGFYPSDIAVEWESNGQPENNYKTTPPVLDSDGSFFLVSKLTVDKSRWQQGNVFSCSVMHEALHNRFTQKSLSLSPG

SEQ ID NO: 7861 - protein, 831 aa, synthetic construct
  source 1..831: note Ta_VH-CH1/Q39K/S183E/Sp34_VL-X-CH1/Q38K/S183K/CLD201/hole/L SLTGR/YTE/RF
EVQLVESGGGLVKPGGSLKLSCAASGYTFTSYVMHWVRKAPGKGLEWIGYINPYNDGTKYNEKFQGRVTISSDKSISTAYMELSSLRSEDTAMYYCARGTYYYGTRVFDYWGQGTLVTVSSASTKGPSVFPLAPSSKSTSGGTAALGCLVKDYFPEPVTVSWNSGALTSGVHTFPAVLQSSGLYSLESVVTVPSSSLGTQTYICNVNHKPSNTKVDKKVEPKSCDGGGGSGGGGSQAVVTQEPSLTVSPGGTVTLTCGSSTGAVTTSNYANWVQKKPGQAFRGLIGGTNKRAPGTPARFSGSLLGGKAALTLSGAQPEDEAEYYCALWYSNLWVFGGGTKLTVLSSASTKGPSVFPLAPSSKSTSGGTAALGCLVKDYFPEPVTVSWNSGALTSGVHTFPAVLQSSGLYSLKSVVTVPSSSLGTQTYICNVNHKPSNTKVDKKVEPKSCTDWSPYADQSIKVRISLKSALGDKAYEWNDNEMYLFRSSVAYAMRQYFLKVKNQMILFGEEDVRVANLKPRISFNFFVTAPKNVSDIIPRTEVEKAIRMSRSRINDAFRLNDNSLEFLGIQPTLGPPNQPPVSTSTSPTRSMAPGAVHLPQPVSTRDKTHTCPPCPAPESTRGPSVFLFPPKPKDTLYITREPEVTCVVVDVSHEDPEVKFNWYVDGVEVHNAKTKPREEQYNSTYRVVSVLTVLHQDWLNGKEYKCKVSNKALPAPIEKTISKAKGQPREPQVCTLPPSRDELTKNQVSLSCAVKGFYPSDIAVEWESNGQPENNYKTTPPVLDSDGSFFLVSKLTVDKSRWQQGNVFSCSVMHEALHNRFTQKSLSLSPG

SEQ ID NO: 7862 - protein, 450 aa, synthetic construct
  source 1..450: note = Ta_VH-CH1/Q39K/S183E/knob/LSLTGR/YTE
EVQLVESGGGLVKPGGSLKLSCAASGYTFTSYVMHWVRKAPGKGLEWIGYINPYNDGTKYNEKFQGRVTISSDKSISTAYMELSSLRSEDTAMYYCARGTYYYGTRVFDYWGQGTLVTVSSASTKGPSVFPLAPSSKSTSGGTAALGCLVKDYFPEPVTVSWNSGALTSGVHTFPAVLQSSGLYSLESVVTVPSSSLGTQTYICNVNHKPSNTKVDKKVEPKSCDKTHTCPPCPAPESTRGPSVFLFPPKPKDTLYITREPEVTCVVVDVSHEDPEVKFNWYVDGVEVHNAKTKPREEQYNSTYRVVSVLTVLHQDWLNGKEYKCKVSNKALPAPIEKTISKAKGQPREPQVYTLPPCRDELTKNQVSLWCLVKGFYPSDIAVEWESNGQPENNYKTTPPVLDSDGSFFLYSKLTVDKSRWQQGNVFSCSVMHEALHNHYTQKSLSLSPG

SEQ ID NO: 7863 - protein, 831 aa, synthetic construct
  source 1..831: note Sp34_VL-X-CH1/Q38K/S183K/Ta_VH-CH1/Q39K/S183E/CLD201/hole/L SLTGR/YTE/RF
QAVVTQEPSLTVSPGGTVTLTCGSSTGAVTTSNYANWVQKKPGQAFRGLIGGTNKRAPGTPARFSGSLLGGKAALTLSGAQPEDEAEYYCALWYSNLWVFGGGTKLTVLSSASTKGPSVFPLAPSSKSTSGGTAALGCLVKDYFPEPVTVSWNSGALTSGVHTFPAVLQSSGLYSLKSVVTVPSSSLGTQTYICNVNHKPSNTKVDKKVEPKSCDGGGGSGGGGSEVQLVESGGGLVKPGGSLKLSCAASGYTFTSYVMHWVRKAPGKGLEWIGYINPYNDGTKYNEKFQGRVTISSDKSISTAYMELSSLRSEDTAMYYCARGTYYYGTRVFDYWGQGTLVTVSSASTKGPSVFPLAPSSKSTSGGTAALGCLVKDYFPEPVTVSWNSGALTSGVHTFPAVLQSSGLYSLESVVTVPSSSLGTQTYICNVNHKPSNTKVDKKVEPKSCTDWSPYADQSIKVRISLKSALGDKAYEWNDNEMYLFRSSVAYAMRQYFLKVKNQMILFGEEDVRVANLKPRISFNFFVTAPKNVSDIIPRTEVEKAIRMSRSRINDAFRLNDNSLEFLGIQPTLGPPNQPPVSTSTSPTRSMAPGAVHLPQPVSTRDKTHTCPPCPAPESTRGPSVFLFPPKPKDTLYITREPEVTCVVVDVSHEDPEVKFNWYVDGVEVHNAKTKPREEQYNSTYRVVSVLTVLHQDWLNGKEYKCKVSNKALPAPIEKTISKAKGQPREPQVCTLPPSRDELTKNQVSLSCAVKGFYPSDIAVEWESNGQPENNYKTTPPVLDSDGSFFLVSKLTVDKSRWQQGNVFSCSVMHEALHNRFTQKSLSLSPG

SEQ ID NO: 7864 - protein, 605 aa, synthetic construct
  source 1..605: note = FMC47_VH-CH1/N84S/Q39K/S183E/CLD201/knob/LSLTGR/YTE
QVQLVQSGGGVVQPGRSLRLSCAASGVSLPDYGVSWVRKAPGKGLEWVAVIWGSETTYYNSALKSRFTISRDNSKNTLYLQMSSLRAEDTAVYYCAKHYYYGGSFAMDYWGQGTLVTVSSASTKGPSVFPLAPSSKSTSGGTAALGCLVKDYFPEPVTVSWNSGALTSGVHTFPAVLQSSGLYSLESVVTVPSSSLGTQTYICNVNHKPSNTKVDKKVEPKSCTDWSPYADQSIKVRISLKSALGDKAYEWNDNEMYLFRSSVAYAMRQYFLKVKNQMILFGEEDVRVANLKPRISFNFFVTAPKNVSDIIPRTEVEKAIRMSRSRINDAFRLNDNSLEFLGIQPTLGPPNQPPVSTSTSPTRSMAPGAVHLPQPVSTRDKTHTCPPCPAPESTRGPSVFLFPPKPKDTLYITREPEVTCVVVDVSHEDPEVKFNWYVDGVEVHNAKTKPREEQYNSTYRVVSVLTVLHQDWLNGKEYKCKVSNKALPAPIEKTISKAKGQPREPQVYTLPPCRDELTKNQVSLWCLVKGFYPSDIAVEWESNGQPENNYKTTPPVLDSDGSFFLYSKLTVDKSRWQQGNVFSCSVMHEALHNHYTQKSLSLSPG

SEQ ID NO: 7865 - protein, 674 aa, synthetic construct
  source 1..674: note FMC47_VH-CH1/N84S/Q39K/S183E/Sp34_VL-X-CH1/Q38K/S183K/hole/ LSLTGR/YTE/RF
QVQLVQSGGGVVQPGRSLRLSCAASGVSLPDYGVSWVRKAPGKGLEWVAVIWGSETTYYNSALKSRFTISRDNSKNTLYLQMSSLRAEDTAVYYCAKHYYYGGSFAMDYWGQGTLVTVSSASTKGPSVFPLAPSSKSTSGGTAALGCLVKDYFPEPVTVSWNSGALTSGVHTFPAVLQSSGLYSLESVVTVPSSSLGTQTYICNVNHKPSNTKVDKKVEPKSCDGGGGSGGGGSQAVVTQEPSLTVSPGGTVTLTCGSSTGAVTTSNYANWVQKKPGQAFRGLIGGTNKRAPGTPARFSGSLLGGKAALTLSGAQPEDEAEYYCALWYSNLWVFGGGTKLTVLSSASTKGPSVFPLAPSSKSTSGGTAALGCLVKDYFPEPVTVSWNSGALTSGVHTFPAVLQSSGLYSLKSVVTVPSSSLGTQTYICNVNHKPSNTKVDKKVEPKSCDKTHTCPPCPAPESTRGPSVFLFPPKPKDTLYITREPEVTCVVVDVSHEDPEVKFNWYVDGVEVHNAKTKPREEQYNSTYRVVSVLTVLHQDWLNGKEYKCKVSNKALPAPIEKTISKAKGQPREPQVCTLPPSRDELTKNQVSLSCAVKGFYPSDIAVEWESNGQPENNYKTTPPVLDSDGSFFLVSKLTVDKSRWQQGNVFSCSVMHEALHNRFTQKSLSLSPG

SEQ ID NO: 7866 - protein, 606 aa, synthetic construct
  source 1..606: note = Ta_VH-CH1/Q39K/S183E/CLD201/knob/LSLTGR/YTE/RF
EVQLVESGGGLVKPGGSLKLSCAASGYTFTSYVMHWVRKAPGKGLEWIGYINPYNDGTKYNEKFQGRVTISSDKSISTAYMELSSLRSEDTAMYYCARGTYYYGTRVFDYWGQGTLVTVSSASTKGPSVFPLAPSSKSTSGGTAALGCLVKDYFPEPVTVSWNSGALTSGVHTFPAVLQSSGLYSLESVVTVPSSSLGTQTYICNVNHKPSNTKVDKKVEPKSCTDWSPYADQSIKVRISLKSALGDKAYEWNDNEMYLFRSSVAYAMRQYFLKVKNQMILFGEEDVRVANLKPRISFNFFVTAPKNVSDIIPRTEVEKAIRMSRSRINDAFRLNDNSLEFLGIQPTLGPPNQPPVSTSTSPTRSMAPGAVHLPQPVSTRDKTHTCPPCPAPESTRGPSVFLFPPKPKDTLYITREPEVTCVVVDVSHEDPEVKFNWYVDGVEVHNAKTKPREEQYNSTYRVVSVLTVLHQDWLNGKEYKCKVSNKALPAPIEKTISKAKGQPREPQVYTLPPCRDELTKNQVSLWCLVKGFYPSDIAVEWESNGQPENNYKTTPPVLDSDGSFFLYSKLTVDKSRWQQGNVFSCSVMHEALHNHYTQKSLSLSPG

SEQ ID NO: 7867 - protein, 675 aa, synthetic construct
  source 1..675: note Ta_VH-CH1/Q39K/S183E/Sp34_VL-X-CH1/Q38K/S183K/hole/LSLTGR/Y TE/RF
EVQLVESGGGLVKPGGSLKLSCAASGYTFTSYVMHWVRKAPGKGLEWIGYINPYNDGTKYNEKFQGRVTISSDKSISTAYMELSSLRSEDTAMYYCARGTYYYGTRVFDYWGQGTLVTVSSASTKGPSVFPLAPSSKSTSGGTAALGCLVKDYFPEPVTVSWNSGALTSGVHTFPAVLQSSGLYSLESVVTVPSSSLGTQTYICNVNHKPSNTKVDKKVEPKSCDGGGGSGGGGSQAVVTQEPSLTVSPGGTVTLTCGSSTGAVTTSNYANWVQKKPGQAFRGLIGGTNKRAPGTPARFSGSLLGGKAALTLSGAQPEDEAEYYCALWYSNLWVFGGGTKLTVLSSASTKGPSVFPLAPSSKSTSGGTAALGCLVKDYFPEPVTVSWNSGALTSGVHTFPAVLQSSGLYSLKSVVTVPSSSLGTQTYICNVNHKPSNTKVDKKVEPKSCDKTHTCPPCPAPESTRGPSVFLFPPKPKDTLYITREPEVTCVVVDVSHEDPEVKFNWYVDGVEVHNAKTKPREEQYNSTYRVVSVLTVLHQDWLNGKEYKCKVSNKALPAPIEKTISKAKGQPREPQVCTLPPSRDELTKNQVSLSCAVKGFYPSDIAVEWESNGQPENNYKTTPPVLDSDGSFFLVSKLTVDKSRWQQGNVFSCSVMHEALHNRFTQKSLSLSPG

SEQ ID NO: 7868 - protein, 219 aa, synthetic construct
  source 1..219: note = Ta_VK-CK/Q38E/V133K
DIVMTQSPATLSLSPGERATLSCRSSKSLQNVNGNTYLYWFQEKPGQSPQLLIYRMSNLNSGVPDRFSGSGSGTEFTLTISSLEPEDFAVYYCMQHLEYPITFGAGTKLEIKRTVAAPSVFIFPPSDEQLKSGTASVKCLLNNFYPREAKVQWKVDNALQSGNSQESVTEQDSKDSTYSLSSTLTLSKADYEKHKVYACEVTHQGLSSPVTKSFNRGEC

SEQ ID NO: 7869 - protein, 230 aa, synthetic construct
  source 1..230: note = Sp34_VH-X-CLambda103/N84S/Q39E/V133E
EVQLLESGGGLVQPGGSLRLSCAASGFTFSTYAMNWVREAPGKGLEWVSRIRSKYNNYATYYADSVKGRFTISRDDSKNTLYLQMSSLRAEDTAVYYCVRHGNFGNSYVSWFAYWGQGTLVTVSGQPKAAPSVTLFPPSSEELQANKATLECLISDFYPGAVTVAWKADSSPVKAGVETTTPSKQSNNKYAASSYLSLTPEQWKSHRSYSCQVTHEGSTVEKTVAPTECS

SEQ ID NO: 7870 - protein, 231 aa, synthetic construct
  source 1..231: note = Sp34_VH-X-CLambdaReg/N84S/Q39E/V133E
EVQLLESGGGLVQPGGSLRLSCAASGFTFSTYAMNWVREAPGKGLEWVSRIRSKYNNYATYYADSVKGRFTISRDDSKNTLYLQMSSLRAEDTAVYYCVRHGNFGNSYVSWFAYWGQGTLVVTVSGQPKAAPSVTLFPPSSEELQANKATLECLISDFYPGAVTVAWKADSSPVKAGVETTTPSKQSNNKYAASSYLSLTPEQWKSHRSYSCQVTHEGSTVEKTVAPTECS
